(19) United States
(12) Patent Application Publication
(10) Pub. No.: US 2023/0151072 A1
(43) Pub. Date: May 18, 2023

(54) MASKED IL-2 CYTOKINES AND THEIR CLEAVAGE PRODUCTS

(71) Applicant: Xilio Development, Inc., Waltham, MA (US)

(72) Inventors: Raphael ROZENFELD, Waltham, MA (US); Ugur ESKIOCAK, Waltham, MA (US); Huawei QIU, Waltham, MA (US); Parker JOHNSON, Waltham, MA (US); Kurt Allen JENKINS, Waltham, MA (US); Magali PEDERZOLI-RIBEIL, Waltham, MA (US); Dheeraj Singh TOMAR, Waltham, MA (US); Rebekah Kay O'DONNELL, Waltham, MA (US)

(21) Appl. No.: 17/995,163

(22) PCT Filed: Mar. 31, 2021
(86) PCT No.: PCT/US2021/025103

§ 371 Date: Sep. 30, 2022

Related U.S. Application Data
(60) Provisional application No. 63/003,824, filed on Apr. 1, 2020.
(60) Provisional application No. 63/118,571, filed on Nov. 25, 2020.

(51) Int. Cl. C07K 14/55; C07K 14/715; A61P 35/00

(52) U.S. Cl. CPC C07K 14/55; C07K 14/7155; A61P 35/00; C07K 2319/50; C07K 2319/30; C07K 2318/10; A61K 38/00

(57) ABSTRACT

The present invention relates to masked IL-2 cytokines, comprising an IL-2 cytokine or functional fragment thereof, a masking moiety and a proteolytically cleavable linker. The masking moiety masks the IL-2 cytokine or functional fragment thereof thereby reducing or preventing binding of the IL-cytokine or functional fragment thereof to its cognate receptor, but upon proteolytic cleavage of the cleavable linker at a target site, the IL-2 cytokine or functional fragment thereof becomes activated, which renders it capable or more capable of binding to its cognate receptor.

### CROSS-REFERENCE TO RELATED APPLICATIONS

[0001] This application claims the priority benefit of U.S. Provisional Application Ser. No. 63/003,824, filed Apr. 1, 2020; and 63/118,571, filed Nov. 25, 2020; each of which is incorporated herein by reference in its entirety.

### SUBMISSION OF SEQUENCE LISTING ON ASCII TEXT FILE

[0002] The content of the following submission on ASCII text file is incorporated herein by reference in its entirety: a computer readable form (CRF) of the Sequence Listing (file name: 737762002740SEQLIST.TXT, date recorded: Mar. 26, 2021, size: 650 KB).

### FIELD

[0003] This invention relates to masked IL-2 cytokines and methods related to the use and manufacture of the same. This invention also relates to cleavage products of said masked IL-2 cytokines, and methods related to the use of the same.

### BACKGROUND

[0004] Cancer is the second leading cause of death in the United States, accounting for more deaths than the next five leading causes (chronic respiratory disease, stroke, accidents, Alzheimer's disease and diabetes). While great strides have been made especially with targeted therapies, there remains a great deal of work to do in this space. Immunotherapy and a branch of this field, immuno-oncology, is creating viable and exciting therapeutic options for treating malignancies. Specifically, it is now recognized that one hallmark of cancer is immune evasion and significant efforts have identified targets and developed therapies to these targets to reactivate the immune system to recognize and treat cancer.

[0005] Cytokine therapy is an effective strategy for stimulating the immune system to induce anti-tumor cytotoxicity. In particular, aldesleukin, a recombinant form of interleukin-2 (IL-2), has been approved by the FDA for the treatment of metastatic renal cell carcinoma and melanoma. Unfortunately, cytokines that are administered to patients generally have a very short half-life, thereby requiring frequent dosing. For instance, the product label of aldesleukin, marketed under the brand name Proleukin, states that the drug was shown to have a half-life of 85 minutes in patients who received a 5-minute intravenous (IV) infusion.

[0006] In addition, administration of high doses of cytokine can cause adverse health outcomes, such as vascular leakage, through systemic immune activation. These findings illustrate the need for developing IL-2 cytokine therapeutics that effectively target tumors without the side effects associated with systemic immune activation. Provided herein are masked IL-2 cytokines, cleavage products of said masked IL-2 cytokines, and compositions thereof and methods of use thereof for addressing this need.

### SUMMARY

[0007] The disclosed invention relates to IL-2 cytokines or functional fragments thereof that are engineered to be masked by a masking moiety at one or more receptor binding site(s) of the IL-2 cytokine or functional fragment thereof. The IL-2 cytokines are engineered to be activatable by a protease at a target site, such as in a tumor microenvironment, by including a proteolytically cleavable linker. In the masked cytokine construct, the masking moiety reduces or prevents binding of the IL-2 cytokine or functional fragment thereof to its cognate receptor. Upon proteolytic cleavage of the cleavable linker at the target site, the IL-2 cytokine or functional fragment thereof becomes activated, which renders it capable or more capable of binding to its cognate receptor.

[0008] Provided herein is a masked IL-2 cytokine comprising a protein heterodimer comprising:
[0009] a) a first polypeptide chain comprising a masking moiety linked to a first half-life extension domain via a first linker; and
[0010] b) a second polypeptide chain comprising an IL-2 cytokine or functional fragment thereof linked to a second half-life extension domain via a second linker,

[0011] wherein the first half-life extension domain is associated with the second half-life extension domain, and wherein one of the first linker or the second linker is a proteolytically cleavable linker comprising a proteolytically cleavable peptide.

[0012] In some embodiments, the first half-life extension domain comprises a first Fc domain or a fragment thereof and the second Fc domain comprises an Fc domain or a fragment thereof.

[0013] In some embodiments, the first Fc domain comprises a CH3 domain or a fragment thereof and the second Fc domain comprises a CH3 domain or a fragment thereof.

[0014] In some embodiments, the first and second half-life extension domains are each an IgG1 Fc domain or fragment thereof.

[0015] In some embodiments, the first and/or second Fc domains each contain one or more modifications that promote the non-covalent association of the first and the second half-life extension domains.

[0016] In some embodiments, the first half-life extension domain comprises an IgG1 Fc domain or fragment thereof including the mutations Y349C; T366S; L38A; and Y407V to form a ‘hole’ in the first half-life extension domain and the second half-life extension domain comprises an IgG1 Fc domain or fragment thereof including the mutations S354C and T366W to form the ‘knob’ in the second half-life extension domain, numbered according to the Kabat EU numbering system.

[0017] In some embodiments, the first and second half-life extension domains are each an IgG1 Fc domain or fragment thereof and each comprise the amino substitution N297A, numbered according to the Kabat EU numbering system.

[0018] In some embodiments, the first and second half-life extension domains are each an IgG1 Fc domain or fragment thereof and each comprise the amino substitution I253A, numbered according to the Kabat EU numbering system.

[0019] In some embodiments, the first half-life extension domain comprises the amino acid sequence of SEQ ID NO: 9, and the second half-life extension domain thereof comprises the amino acid sequence of SEQ ID NO: 12.

[0020] In some embodiments, the first half-life extension domain comprises the amino acid sequence of SEQ ID NO: 10 and the second half-life extension domain thereof comprises the amino acid sequence of SEQ ID NO: 13.

[0021] In some embodiments, the IL-2 cytokine or functional fragment thereof is modified compared to the sequence of a mature IL-2 having SEQ ID NO: 2.

[0022] In some embodiments, the modified IL-2 cytokine or functional fragment thereof comprises modifications R38A, F42A, Y45A, and E62A relative to the sequence of a mature IL-2 having SEQ ID NO: 2.

[0023] In some embodiments, the modified IL-2 cytokine or functional fragment thereof comprises the modification C125A relative to the sequence of a mature IL-2 having SEQ ID NO: 2.

[0024] In some embodiments, the modified IL-2 cytokine or functional fragment thereof comprises R38A, F42A, Y45A, E62A and C125A relative to the sequence of a mature IL-2 having SEQ ID NO: 2.

[0025] In some embodiments, the IL-2 cytokine or functional fragment thereof comprises an amino acid sequence of SEQ ID NO: 3.

[0026] In some embodiments, the masking moiety comprises IL-2Rβ or a fragment, portion or variant thereof.

[0027] In some embodiments, the IL-2Rβ or a fragment, portion or variant thereof comprises an amino acid sequence of SEQ ID NO: 4.

[0028] In some embodiments, wherein the IL-2Rβ or a fragment, portion or variant thereof comprises an amino acid sequence of SEQ ID NO: 5.

[0029] In some embodiments, the second linker comprises a proteolytically cleavable peptide such that the second linker is a proteolytically cleavable linker and the first linker does not comprise a proteolytically cleavable peptide such that the first linker is a non-proteolytically cleavable linker.

[0030] In some embodiments, the first linker comprises a proteolytically cleavable peptide such that the first linker is a proteolytically cleavable linker and the second linker does not comprise a proteolytically cleavable peptide such that the second linker is a non-proteolytically cleavable linker.

[0031] In some embodiments, the proteolytically cleavable linker is from 10 to 25 amino acids in length.

[0032] In some embodiments, the cleavable peptide within the proteolytically cleavable linker comprises an amino acid sequence selected from the group consisting of SEQ ID NOs: 24, 25, 26, 27 and 28.

[0033] In some embodiments, the cleavable peptide within the proteolytically cleavable linker comprises SEQ ID NO: 118.

[0034] In some embodiments, the cleavable peptide within the proteolytically cleavable linker comprises SEQ ID NO: 119.

[0035] In some embodiments, the proteolytically cleavable linker comprises a proteolytically cleavable peptide flanked on both sides by a spacer domain.

[0036] In some embodiments, the spacer domains are rich in amino acid residues G, S and P.

[0037] In some embodiments, the spacer domains only include amino acid residue types selected from the group consisting of G, S and P.

[0038] In some embodiments, the proteolytically cleavable linker comprises an amino acid sequence selected from the group consisting of SEQ ID NOs: 16, 17, 18, 19, 20, 21 and 22.

[0039] In some embodiments, the proteolytically cleavable linker comprises an amino acid sequence selected from the group consisting of SEQ ID NO: 19.

[0040] In some embodiments, the proteolytically cleavable linker comprises an amino acid sequence selected from the group consisting of SEQ ID NO: 17.

[0041] In some embodiments, the proteolytically cleavable linker comprises SD1-CP-SD2 where SD1 is a first spacer domain, CP is a cleavable peptide and SD2 is a second spacer domain, and wherein CP has an amino acid sequence as shown in SEQ ID NO: 118 and SD2 has an amino acid sequence as shown in SEQ ID NO: 29.

[0042] In some embodiments, the proteolytically cleavable linker comprises SD1-CP-SD2 where SD1 is a first spacer domain, CP is a cleavable peptide and SD2 is a second spacer domain, and wherein CP has an amino acid sequence as shown in SEQ ID NO: 119 and SD2 has an amino acid sequence as shown in SEQ ID NO: 29.

[0043] In some embodiments, the SD2 is from 3 to 6 amino acids in length.

[0044] In some embodiments, the proteolytically cleavable linker comprises an amino acid sequence selected from the group consisting of SEQ ID NO: 115.

[0045] In some embodiments, the proteolytically cleavable linker comprises an amino acid sequence selected from the group consisting of SEQ ID NO: 116.

[0046] In some embodiments, the proteolytically cleavable linker comprises an amino acid sequence selected from the group consisting of SEQ ID NO: 117.

[0047] In some embodiments, the proteolytically cleavable linker comprises an amino acid sequence selected from the group consisting of SEQ ID NO: 112.

[0048] In some embodiments, the proteolytically cleavable linker comprises an amino acid sequence selected from the group consisting of SEQ ID NO: 113.

[0049] In some embodiments, the proteolytically cleavable linker comprises an amino acid sequence selected from the group consisting of SEQ ID NO: 114.

[0050] In some embodiments, the non-proteolytically cleavable linker is between 3 and 18 amino acids in length.

[0051] In some embodiments, the non-proteolytically cleavable linker is between 3 and 8 amino acids in length.

[0052] In some embodiments, wherein the non-proteolytically cleavable linker is rich in amino acid residues G, S and P.

[0053] In some embodiments, the non-proteolytically cleavable linker comprises an amino acid sequence of SEQ ID NO: 14.

[0054] In some embodiments, the non-proteolytically cleavable linker comprises an amino acid sequence of SEQ ID NO: 23.

[0055] In some embodiments, the masked IL-2 cytokine comprises a first polypeptide chain of SEQ ID NO: 38.

[0056] In some embodiments, the masked IL-2 cytokine comprises a first polypeptide chain of SEQ ID NO: 39.

[0057] In some embodiments, the masked IL-2 cytokine comprises a first polypeptide chain of SEQ ID NO: 125.

[0058] In some embodiments, the masked IL-2 cytokine comprises a first polypeptide chain of SEQ ID NO: 126.

[0059] In some embodiments, the masked IL-2 cytokine comprises a first polypeptide chain of SEQ ID NO: 127.

[0060] In some embodiments, the masked IL-2 cytokine comprises a first polypeptide chain of SEQ ID NO: 39 and a second polypeptide chain of SEQ ID NO: 49.

[0061] In some embodiments, the masked IL-2 cytokine comprises a first polypeptide chain of SEQ ID NO: 40 and a second polypeptide chain of SEQ ID NO: 51.

[0062] In some embodiments, the masked IL-2 cytokine comprises a first polypeptide chain of SEQ ID NO: 38 and a second polypeptide chain of SEQ ID NO: 128.

[0063] In some embodiments, the masked IL-2 cytokine comprises a first polypeptide chain of SEQ ID NO: 38 and a second polypeptide chain of SEQ ID NO: 129.

[0064] In some embodiments, the masked IL-2 cytokine comprises a first polypeptide chain of SEQ ID NO: 38 and a second polypeptide chain of SEQ ID NO: 130.

[0065] In some embodiments, the masked IL-2 cytokine comprises a first polypeptide chain of SEQ ID NO: 125 and a second polypeptide chain of SEQ ID NO: 51.

[0066] In some embodiments, the masked IL-2 cytokine comprises a first polypeptide chain of SEQ ID NO: 126 and a second polypeptide chain of SEQ ID NO: 51.

[0067] In some embodiments, the masked IL-2 cytokine comprises a first polypeptide chain of SEQ ID NO: 127 and a second polypeptide chain of SEQ ID NO: 51.

[0068] Provided herein is a masked IL-2 cytokine comprising a masking moiety and an IL-2 cytokine or functional fragment thereof, wherein the masking moiety masks the IL-2 cytokine or functional fragment thereof thereby reducing or preventing binding of the IL-cytokine or functional fragment thereof to its cognate receptor, and wherein a proteolytically cleavable peptide is present between the IL-2 fragment or functional fragment thereof and masking moiety.

[0069] In some embodiments, the masking moiety and IL-2 cytokine or functional fragment thereof are linked in a single polypeptide chain.

[0070] In some embodiments, the masked IL-2 cytokine comprises a polypeptide chain comprising formula 1:

N′HL-L2-C-L1-MM C′ (1)

[0071] where HL is the half life extension domain, L1 is the first linker, MM is the masking moiety, L2 is the second linker, and C is the IL-2 cytokine or functional fragment thereof, wherein at least the first linker comprises a proteolytically cleavable peptide.

[0072] In some embodiments, the masked IL-2 cytokine comprises a polypeptide chain comprising formula 2:

N′HL-L2-MM-L1-C C′ (2)

[0073] where HL is the half life extension domain, L1 is the first linker, MM is the masking moiety, L2 is the second linker, and C is the IL-2 cytokine or functional fragment thereof, wherein at least the first linker comprises a proteolytically cleavable peptide.

[0074] In some embodiments, the masking moiety comprises IL-2Rβ or a fragment, portion or variant thereof.

[0075] In some embodiments, the IL-2Rβ or a fragment, portion or variant thereof has mutations at amino acid positions C122 and C168 as compared to IL-2β of SEQ ID NO: 4.

[0076] In some embodiments, the IL-2Rβ or a fragment, portion or variant thereof has mutations C122S and C168S as compared to IL-2β of SEQ ID NO: 4.

[0077] In some embodiments, the half life extension domain (HL) comprises first and second half-life extension domains which are each an IgG1 Fc domain or fragment thereof.

[0078] In some embodiments, the first and/or second Fc domains each contain one or more modifications that promote the non-covalent association of the first and the second half-life extension domains.

[0079] In some embodiments, the first half-life extension domain comprises an IgG1 Fc domain or fragment thereof including the mutations Y349C; T366S; L38A; and Y407V to form a ‘hole’ in the first half-life extension domain and the second half-life extension domain comprises an IgG1 Fc domain or fragment thereof including the mutations S354C and T366W to form the ‘knob’ in the second half-life extension domain, numbered according to the Kabat EU numbering system.

[0080] In some embodiments, the first and second half-life extension domains are each an IgG1 Fc domain or fragment thereof and each comprise the amino substitution N297A, numbered according to the Kabat EU numbering system.

[0081] In some embodiments, the first and second half-life extension domains are each an IgG1 Fc domain or fragment thereof and each comprise the amino substitution I253A, numbered according to the Kabat EU numbering system.

[0082] In some embodiments, the first half-life extension domain comprises the amino acid sequence of SEQ ID NO: 9, and the second half-life extension domain thereof comprises the amino acid sequence of SEQ ID NO: 12.

[0083] In some embodiments, the first half-life extension domain comprises the amino acid sequence of SEQ ID NO: 10 and the second half-life extension domain thereof comprises the amino acid sequence of SEQ ID NO: 13.

[0084] In some embodiments, the cleavable peptide within the proteolytically cleavable linker comprises SEQ ID NO: 118.

[0085] In some embodiments, the cleavable peptide within the proteolytically cleavable linker comprises SEQ ID NO: 119.

[0086] In some embodiments, the proteolytically cleavable linker comprises SD1-CP-SD2 where SD1 is a first spacer domain, CP is a cleavable peptide and SD2 is a second spacer domain, and wherein CP has an amino acid sequence as shown in SEQ ID NO: 118 and SD2 has an amino acid sequence as shown in SEQ ID NO: 29.

[0087] In some embodiments, the proteolytically cleavable linker comprises SD1-CP-SD2 where SD1 is a first spacer domain, CP is a cleavable peptide and SD2 is a second spacer domain, and wherein CP has an amino acid sequence as shown in SEQ ID NO: 119 and SD2 has an amino acid sequence as shown in SEQ ID NO: 29.

[0088] In some embodiments, the SD2 is from 3 to 6 amino acids in length.

[0089] In some embodiments, the proteolytically cleavable linker comprises an amino acid sequence selected from the group consisting of SEQ ID NO: 115.

[0090] In some embodiments, the proteolytically cleavable linker comprises an amino acid sequence selected from the group consisting of SEQ ID NO: 116.

[0091] In some embodiments, the proteolytically cleavable linker comprises an amino acid sequence selected from the group consisting of SEQ ID NO: 112.

[0092] In some embodiments, the proteolytically cleavable linker comprises an amino acid sequence selected from the group consisting of SEQ ID NO: 113.

[0093] In some embodiments, the proteolytically cleavable linker comprises an amino acid sequence selected from the group consisting of SEQ ID NO: 114.

[0094] Provided herein is a cleavage product capable of binding to its cognate receptor, the cleavage product comprising an IL-2 cytokine or functional fragment thereof, preparable by proteolytic cleavage of the cleavable peptide in the masked IL-2 cytokine as defined in of any one of the statements or embodiments described herein.

[0095] Provided herein is a cleavage product of a masked IL-2 cytokine, where the cleavage product is capable of binding to its cognate receptor, the cleavage product comprising a polypeptide comprising formula 3:

PCP-SD-C (3)

[0096] wherein PCP is a portion of a proteolytically cleavable peptide; SD is a spacer domain; and C is an IL-2 cytokine or functional fragment thereof.

[0097] In some embodiments, the IL-2 cytokine or functional fragment thereof is modified compared to the sequence of a mature IL-2 polypeptide having SEQ ID NO: 2.

[0098] In some embodiments, the modified IL-2 cytokine or functional fragment thereof comprises modifications R38A, F42A, Y45A, and E62A relative to the sequence of a mature IL-2 having SEQ ID NO: 2.

[0099] In some embodiments, the modified IL-2 cytokine or functional fragment thereof comprises the modification C125A relative to the sequence of a mature IL-2 having SEQ ID NO: 2.

[0100] In some embodiments, the modified IL-2 cytokine or functional fragment thereof comprises R38A, F42A, Y45A, E62A and C125A.

[0101] In some embodiments, the IL-2 cytokine or functional fragment thereof comprises an amino acid sequence of SEQ ID NO: 3.

[0102] In some embodiments, the spacer domain is rich in amino acid residues G, S and P.

[0103] In some embodiments, the spacer domain only includes amino acid residue types selected from the group consisting of G, S and P.

[0104] In some embodiments, the spacer domain comprises an amino acid sequence of any one of SEQ ID NO: 29, 30 and 31.

[0105] In some embodiments, the portion of the proteolytically cleavable peptide is a portion of an amino acid sequence of any one of SEQ ID NOs: 24, 25, 26, 27 and 28.

[0106] In some embodiments, the portion of the proteolytically cleavable peptide is a portion of an amino acid sequence of SEQ ID NO: 118.

[0107] In some embodiments, the portion of the proteolytically cleavable peptide is a portion of an amino acid sequence of SEQ ID NO: 119.

[0108] In some embodiments, the cleavage product comprises the amino acid sequence of SEQ ID NO: 56.

[0109] In some embodiments, the cleavage product comprises the amino acid sequence of SEQ ID NO: 137.

[0110] Provided herein is a cleavage product of a masked IL-2 cytokine, where the cleavage product is capable of binding to its cognate receptor, the cleavage product comprising a protein heterodimer comprising: a first polypeptide chain comprising a polypeptide comprising formula 4:

HL1-SD-PCP (4)

[0111] wherein HL1 is a first half-life extension domain; SD is a spacer domain; and PCP is a portion of a proteolytically cleavable peptide; and

[0112] a second polypeptide chain comprising a polypeptide comprising formula 5:

HL2-L2-C (5)

[0113] wherein HL2 is a second half-life extension domain; L2 is a linker; and C is an IL-2 cytokine or functional fragment thereof; and

[0114] wherein the first half-life extension domain is associated with the second half-life extension domain.

[0115] In some embodiments, the IL-2 cytokine or functional fragment thereof is modified compared to the sequence of a mature IL-2 having SEQ ID NO: 2.

[0116] In some embodiments, the modified IL-2 cytokine or functional fragment thereof comprises modifications R38A, F42A, Y45A, and E62A relative to the sequence of a mature IL-2 having SEQ ID NO: 2.

[0117] In some embodiments, the modified IL-2 cytokine or functional fragment thereof comprises the modification C125A relative to the sequence of a mature IL-2 having SEQ ID NO: 2.

[0118] In some embodiments, the modified IL-2 cytokine or functional fragment thereof comprises R38A, F42A, Y45A, E62A and C125A.

[0119] In some embodiments, the IL-2 cytokine or functional fragment thereof comprises an amino acid sequence of SEQ ID NO: 3.

[0120] In some embodiments, the first half-life extension domain comprises a first Fc domain or a fragment thereof and the second Fc domain comprises an Fc domain or a fragment thereof.

[0121] In some embodiments, the first Fc domain comprises a CH3 domain or a fragment thereof and the second Fc domain comprises a CH3 domain or a fragment thereof.

[0122] In some embodiments, the first and second half-life extension domains are each an IgG1 Fc domain or fragment thereof.

[0123] In some embodiments, the first and/or second Fc domains each contain one or more modifications that promote the non-covalent association of the first and the second half-life extension domains.

[0124] In some embodiments, the first and second half-life extension domains are each an IgG1 Fc domain or fragment thereof and each comprise the amino substitution N297A, numbered according to the Kabat EU numbering system.

[0125] In some embodiments, the first and second half-life extension domains are each an IgG1 Fc domain or fragment thereof and each comprise the amino substitutions N297A and I253A, numbered according to the Kabat EU numbering system.

[0126] In some embodiments, the first half-life extension domain comprises the amino acid sequence of SEQ ID NO: 9, and the second half-life extension domain thereof comprises the amino acid sequence of SEQ ID NO: 12.

[0127] In some embodiments, the first half-life extension domain comprises the amino acid sequence of SEQ ID NO: 10 and the second half-life extension domain thereof comprises the amino acid sequence of SEQ ID NO: 13.

[0128] In some embodiments, the second linker comprises an amino acid sequence of SEQ ID NO: 23.

[0129] In some embodiments, the spacer domain is rich in amino acids residues G, S and P.

[0130] In some embodiments, the spacer domain only includes amino acid residue types selected from the group consisting of G, S and P.

[0131] In some embodiments, the spacer domain comprises an amino acid sequence of SEQ ID NOs: 32, 33, 34, 35, 36 and 37.

[0132] In some embodiments, the portion of the proteolytically cleavable peptide is a portion of an amino acid sequence of any one of SEQ ID NOs: 24, 25, 26, 27 and 28.

[0133] In some embodiments, the portion of the proteolytically cleavable peptide is a portion of an amino acid sequence of SEQ ID NO: 118.

[0134] In some embodiments, the portion of the proteolytically cleavable peptide is a portion of an amino acid sequence of SEQ ID NO: 119.

[0135] In some embodiments, the cleavage product comprises a first polypeptide chain having an amino acid sequence of SEQ ID NO: 136 and a second polypeptide chain having an amino acid sequence of SEQ ID NO: 135.

[0136] In some embodiments, the cleavage product comprises a first polypeptide chain having an amino acid sequence of SEQ ID NO: 139 and a second polypeptide chain having an amino acid sequence of SEQ ID NO: 138.

[0137] In some embodiments, the cleavage product comprises a first polypeptide chain having an amino acid sequence of SEQ ID NO: 141 and a second polypeptide chain having an amino acid sequence of SEQ ID NO: 140.

[0138] In some embodiments, the cleavage product comprises a first polypeptide chain having an amino acid sequence of SEQ ID NO: 143 and a second polypeptide chain having an amino acid sequence of SEQ ID NO: 142.

[0139] Provided herein is a nucleic acid encoding any one of the masked IL-2 cytokines described herein.

[0140] Provided herein is a nucleic acid encoding one of the chains of any one of the masked IL-2 cytokines described herein.

[0141] Provided herein is a vector comprising a nucleic acid described herein.

[0142] Provided herein is a vector comprising a nucleic acid encoding a masked IL-2 cytokine described herein.

[0143] Provided herein is a vector comprising a nucleic acid encoding one of the chains of a masked IL-2 cytokine described herein.

[0144] Provided herein is a host cell comprising a nucleic acid described herein.

[0145] In one embodiment, the host cell is a HEK cell. In another embodiment, the host cell is a CHO cell.

[0146] Provided herein is a composition comprising any one of the masked IL-2 cytokines described herein.

[0147] Provided herein is a pharmaceutical composition comprising any one of the masked IL-2 cytokines described herein, and a pharmaceutically acceptable carrier.

[0148] Provided herein is a kit comprising any one of the masked IL-2 cytokines, or the compositions, or the pharmaceutical compositions described herein.

[0149] Provided herein is a method of producing any one of the masked IL-2 cytokines described herein, comprising culturing a host cell described herein under a condition that produces the masked IL-2 cytokine.

[0150] Provided herein is a nucleic acid encoding any one of the cleavage products described herein.

[0151] Provided herein is a composition comprising any one of the cleavage products described herein.

[0152] Provided herein is a pharmaceutical composition comprising any one of the cleavage products described herein, and a pharmaceutically acceptable carrier.

[0153] Provided herein is a masked IL-2 cytokine as described herein for use in medicine.

[0154] Provided herein is a cleavage product as described herein for use in medicine.

[0155] Provided herein is a method of treating or preventing cancer in a subject, the method comprising administering to the subject an effective amount of a masked IL-2 cytokine as described herein.

[0156] Provided herein is a method of treating or preventing cancer in a subject, the method comprising administering to the subject an effective amount of a composition as described herein.

[0157] Provided herein is a method of treating or preventing cancer in a subject, the method comprising administering to the subject an effective amount of a pharmaceutical composition as described herein.

[0158] Provided herein is a method of treating or preventing cancer in a subject, the method comprising administering to the subject an effective amount of a masked IL-2 cytokine as described herein, whereby the masked cytokine is proteolytically cleaved in vivo to produce a cleavage product as described herein.

[0159] Provided herein is a method of treating or preventing cancer in a subject, the method comprising a step of producing a cleavage product in vivo that is capable of binding to its cognate receptor, where the cleavage product is as described herein.

[0160] Provided herein is a masked IL-2 cytokine as described herein for use in treating or preventing cancer.

[0161] Provided herein is a masked IL-2 cytokine as described herein for use in a method of treating or preventing cancer, the method comprising administering to the subject an effective amount of the masked IL-2 cytokine, whereby the masked cytokine is proteolytically cleaved in vivo to produce a cleavage product as described herein.

[0162] Provided herein is a cleavage product as described herein for use in treating or preventing cancer.

[0163] Provided herein is a cleavage product as described herein for use in treating or preventing cancer, the method comprising a step of administering a masked cytokine as described herein to a patient, thereby producing the cleavage product by proteolytic cleavage of the masked cytokine in vivo.

[0164] Provided herein is a cleavage product as described herein for use in a method of treating or preventing cancer in a subject, the method comprising a step of producing the cleavage product by in vivo proteolytic cleavage from a masked cytokine as described herein that has been administered to the subject.

### BRIEF DESCRIPTION OF THE DRAWINGS

[0165] FIG. 1 shows the structure of exemplary embodiments of a masked cytokine that includes a masking moiety, a cytokine or functional fragment thereof (“cytokine”), a half-life extension domain, and a first linker that includes a first cleavable peptide (‘1CP”), a first N-terminal spacer domain (“1NSD”), and a first C-terminal spacer domain (“1CSD”). These exemplary embodiments also include a second linker that includes a second cleavable peptide (“2CP”), a second N-terminal spacer domain (“2NSD”), and a second C-terminal spacer domain (“2CSD”). As shown by the arrows, while the exemplary embodiments shows the masking moiety linked to the first linker, and the cytokine or functional fragment thereof is linked to the first linker and the second linker, the masking moiety and the cytokine or functional fragment thereof can be interchanged such that the cytokine or functional fragment thereof is linked to the first linker, and the masking moiety is linked to the first linker and the second linker. FIG. 1 shows the structure of an exemplary embodiment of a masked cytokine as a monomer.

[0166] FIG. 2 shows the structure of an exemplary embodiment of a masked cytokine that includes a masking moiety, a cytokine or functional fragment thereof (“cytokine”), a first half-life extension domain, and a second half-life extension domain. The exemplary embodiment shown in FIG. 2 also includes a first linker that includes a first cleavable peptide (“1CP”), a first N-terminal spacer domain (“1NSD”), and a first C-terminal spacer domain (“1CSD”), and a second linker that includes a second cleavable peptide (“2CP”), a second N-terminal spacer domain (“2NSD”), and a second C-terminal spacer domain (“2CSD”). The exemplary first and second half-life extension domains include “knobs into holes” modifications that promote the association of the first half-life extension domain with the second half-life extension domain, as shown by the “hole” in the first half-life extension domain and the “knob” in the second half-life extension domain. The first half-life extension domain and the second half-life extension domain are also shown as associating, at least in part, due to the formation of disulfide bonds. It is to be understood that although the “hole” is depicted as part of the first half-life extension domain (linked to the masking moiety) and the “knob” is depicted as part of the second half-life extension domain (linked to the cytokine), the “hole” and the “knob” can alternatively be included in the second half-life extension domain and the first half-life extension domain, respectively, so that the “hole” is a part of the second half-life extension domain (linked to the cytokine) and the “knob” is part of the first half-life extension domain (linked to masking moiety).

[0167] FIGS. 3A-3B show exemplary embodiments of masked cytokines prior to (left) and after (right) cleavage by a protease, such as at the tumor microenvironment. FIGS. 3A-3B show exemplary embodiments of a masked IL-2 cytokine. Cleavage by a protease releases a masking moiety (e.g., IL-2Rβ, as shown in FIG. 3B), or releases an IL-2 (FIG. 3A).

[0168] FIG. 4 shows SDS-PAGE analysis on flow-through (FT) samples (i.e., proteins that did not bind to the Protein A column) and the eluted (E) samples (i.e., proteins that bound to the Protein A column and were eluted from it) following production and purification of IL-2 constructs (AK304, AK305, AK307, AK308, AK309, AK310, AK311, AK312, AK313, AK314, and AK315).

[0169] FIGS. 5A-5D show results from SPR analysis that tested the binding of an exemplary masked IL-2 polypeptide construct (AK168), or a rhIL-2 control, to CD25-Fc. FIG. 5A shows the interaction between AK168 and CD25-Fc, FIG. 5B shows the interaction between AK168 activated with MMP and CD25-Fc, and FIG. 5C shows the interaction between a recombinant human IL-2 (rhIL2) control and CD25-Fc. FIG. 5D provides a table summarizing the data obtained for the association constant (ka), dissociation constant (kd), equilibrium dissociation constant (KD), as well as the Chi2 value and U-value for each interaction.

[0170] FIGS. 6A-6D show results from SPR analysis that tested the binding of an exemplary masked IL-2 polypeptide constructs (AK111), or a rhIL2 control, to CD122-Fc. FIG. 6A shows the interaction between AK111 and CD122-Fc, FIG. 6B shows the interaction between AK111 activated with protease and CD122-Fc, and FIG. 6C shows the interaction between a recombinant human IL-2 (rhIL-2) control and CD122-Fc. FIG. 6D provides a table summarizing the data obtained for the association constant (ka), dissociation constant (kd), equilibrium dissociation constant (KD), as well as the Chi2 value and U-value for each interaction.

[0171] FIG. 7A shows an exemplary embodiment of a masked cytokines prior to (left) and after (right) cleavage by a protease, such as at the tumor microenvironment. FIG. 7B shows SDS-PAGE analysis of an exemplary masked IL-2 polypeptide construct that was incubated in the absence (left lane) or presence (right lane) of the MMP10 protease, which demonstrates the release of IL-2 from the Fc portion.

[0172] FIGS. 8A-8D show STAT5 activation (%) in PBMCs treated with the construct AK032, AK035, AK041, or rhIL-2 as a control. The levels of STAT5 activation (%) are shown for NK cells, CD8+ T cells, effector T cells (Teff), and regulatory T cells (Treg), as determined following incubation with rhIL-2 (FIG. 8A), AK032 (FIG. 8B), AK035 (FIG. 8C), or AK041 (FIG. 8D).

[0173] FIGS. 9A-9C show STAT5 activation (%) in PBMCs treated with the construct AK081 or AK032. The AK081 construct with and without prior exposure to MMP10 was tested. An isotype control as well as a no IL-2 negative control was also tested. The levels of STAT5 activation (%) are shown for NK cells (FIG. 9A), CD8+ T cells (FIG. 9C), and CD4+ T cells (FIG. 9B).

[0174] FIGS. 10A-10D show the results from STAT5 activation studies in PBMCs using constructs AK081 and AK111, as well as controls that included an rhIL-2 and anti-RSV antibody. A no-treatment control was also tested. EC50 (pM) is also shown for the rhIL-2, AK081, and AK111 treatments. STAT5 activation (%) is shown for CD4+FoxP3+CD25+ cells (FIG. 10A), CD8+ cells (FIG. 10B), and CD4+FoxP3-CD25− cells (FIG. 10C). FIG. 10D provides EC50 (pM) and fold-change data for the AK081, AK111 constructs, as well as the rhIL-2 control.

[0175] FIGS. 11A-11D show the results from STAT5 activation studies in PBMCs using constructs AK167 and AK168, as well as controls that included an rhIL-2 and anti-RSV antibody. A no-treatment control was also tested. EC50 (pM) is also shown for the rhIL-2, AK167, and AK168 treatments. STAT5 activation (%) is shown for CD4+FoxP3+CD25+ cells (FIG. 11A), CD8+ cells (FIG. 11B), and CD4+FoxP3-CD25− cells (FIG. 11C). FIG. 11D provides EC50 (pM) and fold-change data for the AK167 and AK168 constructs, as well as the rhIL-2 control.

[0176] FIGS. 12A-12D show STAT5 activation (%) in PBMCs treated with the construct AK165 or AK166, or an isotype control or an IL-2-Fc control, that were (+MMP10) or were not previously exposed to the MMP10 protease. The key as shown in FIG. 12A also applies to FIG. 12B, and the key as shown in FIG. 12C also applies to FIG. 12D. STAT5 activation (%) is shown for CD4+FoxP3+T regulatory cells (FIG. 12A), CD4+FoxP3− T helper cells (FIG. 12B), CD8+ cytotoxic T cells (FIG. 12C), and CD56+NK cells (FIG. 12D).

[0177] FIGS. 13A-13C show STAT5 activation (%) in PBMCs treated with the construct AK109 or AK110, or an isotype control or an IL-2-Fc control, that were (+MMP10) or were not previously exposed to the MMP10 protease. The key as shown in FIG. 12B also applies to FIG. 13A. STAT5 activation (%) is shown for NK cells (FIG. 13A), CD8 cells (FIG. 13B), and CD4 cells (FIG. 13C).

[0178] FIGS. 14A-14D show the results from STAT5 activation studies in PBMCs using the constructs AK211, AK235, AK253, AK306, AK310, AK314, and AK316, as well as an rhIL-2 control. STAT5 activation (%) is shown for CD3+CD4+FoxP3+ cells (FIG. 14A), CD3+CD4+FoxP3−cells (FIG. 14B), and CD3+CD8+ cells (FIG. 14C). FIG. 14D provides EC50 data for each of the tested constructs as well as the rhIL-2 control.

[0179] FIGS. 15A-15D show the results from STAT5 activation studies in PBMCs using the constructs AK081, AK167, AK216, AK218, AK219, AK220, and AK223 that have been activated by protease, as well as an rhIL-2 control. STAT5 activation (%) is shown for CD4+FoxP3+CD25+ regulatory T cells (FIG. 15A), CD4+FoxP3−CD25− cells (FIG. 15B), and CD8+ cells (FIG. 15C). FIG. 15D provides EC50 data for each of the tested constructs as well as the rhIL-2 control.

[0180] FIGS. 16A-16C show STAT5 activation (%) in PBMCs treated with the construct AK081, AK189, AK190, or AK210, or an anti-RSV control. The key as shown in FIG. 16A also applies to FIGS. 16B and 16C. STAT5 activation (%) is shown for regulatory T cells (FIG. 16A), CD4 helper T cells (FIG. 16B), and CD8 cells (FIG. 16C).

[0181] FIGS. 17A-17C show STAT5 activation (%) in PBMCs treated with the construct AK167, AK191, AK192, or AK193, or an anti-RSV control. The key as shown in FIG. 17A also applies to FIGS. 17B and 17C. STAT5 activation (%) is shown for regulatory T cells (FIG. 17A), CD4 helper T cells (FIG. 17B), and CD8 cells (FIG. 17C).

[0182] FIGS. 18A-18D show results from pharmacokinetic studies carried out in tumor-bearing mice using the construct AK032, AK081, AK111, AK167, or AK168, or an anti-RSV control. FIG. 18A provides a simplistic depiction of the structure of each of the constructs tested. FIG. 18B shows Fc levels in plasma (μg/mL) by detecting human IgG, FIG. 18C shows Fc-CD122 levels in plasma (μg/mL) by detecting human CD 122, and FIG. 18D shows Fc-IL2 levels in plasma (μg/mL) by detecting human IL-2. Prior to the detection step, an anti-human IG was used as the capture antibody.

[0183] FIGS. 19A-19D show results from pharmacokinetic studies carried out in tumor-bearing mice using the construct AK167, AK191 AK197, AK203, AK209, or AK211, or an anti-RSV control. FIG. 19A provides a simplistic depiction of the structure of each of the constructs tested. FIG. 19B shows Fc levels in plasma (μg/mL) by detecting human IgG, FIG. 19C shows Fc-IL2 levels in plasma (μg/mL) by detecting human IL-2, and FIG. 19D shows Fc-CD122 levels in plasma (μg/mL) by detecting human CD 122. Prior to the detection step, an anti-human IG was used as the capture antibody.

[0184] FIGS. 20A-20L show results from studies testing the in vivo responses of CD4, CD8, NK, and Treg percentages in spleen, blood, and tumor, using the AK032, AK081, AK111, AK167, or AK168 construct, or an anti-RSV IgG control. For spleen tissue, % CD8 cells of CD3 cells (FIG. 20A), % CD4 of CD3 cells (FIG. 20B), % NK cells of CD3− cells (FIG. 20C), % FoxP3 of CD4 cells (FIG. 20D) is shown. For blood, % CD8 cells of CD3 cells (FIG. 20E), % CD4 of CD3 cells (FIG. 20F), % NK cells of CD3− cells (FIG. 20G), % FoxP3 of CD4 cells (FIG. 20H) is shown. For tumor tissue, % CD8 cells of CD3 cells (FIG. 20I), % CD4 of CD3 cells (FIG. 20J), % NK cells of CD3− cells (FIG. 20K), % FoxP3 of CD4 cells (FIG. 20L) is shown.

[0185] FIGS. 21A-21L show results from studies testing the in vivo responses of CD4, CD8, NK, and Treg percentages in spleen, blood, and tumor, using the AK167, AK168, AK191, AK197, AK203, AK209, or AK211 construct, or an anti-RSV IgG control. For spleen tissue, % CD8 cells of CD3 cells (FIG. 21A), % CD4 of CD3 cells (FIG. 21B), % NK cells of CD3− cells (FIG. 21C), % FoxP3 of CD4 cells (FIG. 21D) is shown. For blood, % CD8 cells of CD3 cells (FIG. 21E), % CD4 of CD3 cells (FIG. 21F), % NK cells of CD3− cells (FIG. 21G), % FoxP3 of CD4 cells (FIG. 21H) is shown. For tumor tissue, % CD8 cells of CD3 cells (FIG. 21I), % CD4 of CD3 cells (FIG. 21J), % NK cells of CD3− cells (FIG. 21K), % FoxP3 of CD4 cells (FIG. 21L) is shown.

[0186] FIGS. 22A-22L show results from studies testing the in vivo responses of CD4, CD8, NK, and Treg percentages in spleen, blood, and tumor, using the AK235, AK191, AK192, AK193, AK210, AK189, AK190, or AK211 construct, or an anti-RSV IgG control. For spleen tissue, % CD8 cells of CD3 cells (FIG. 22A), % CD4 of CD3 cells (FIG. 22B), % NK cells of CD3− cells (FIG. 22C), % FoxP3 of CD4 cells (FIG. 22D) is shown. For blood, % CD8 cells of CD3 cells (FIG. 22E), % CD4 of CD3 cells (FIG. 22F), % NK cells of CD3− cells (FIG. 22G), % FoxP3 of CD4 cells (FIG. 22H) is shown. For tumor tissue, % CD8 cells of CD3 cells (FIG. 22I), % CD4 of CD3 cells (FIG. 22J), % NK cells of CD3− cells (FIG. 22K), % FoxP3 of CD4 cells (FIG. 22L) is shown.

[0187] FIGS. 23A-23I show results from in vivo T cell activation in spleen, blood, and tumor, using the AK235, AK191, AK192, AK193, AK210, AK189, AK190, or AK211 construct. T cell activation was measured as the mean fluorescence intensity (MFI) of CD25 in CD8+ T cells (FIG. 23A; FIG. 23D; FIG. 23G), CD4+ T cells (FIG. 23B; FIG. 23E; FIG. 23H), or Foxp3+ cells (FIG. 23C; FIG. 23F; FIG. 23I) in the spleen, blood, and tumor. Statistical analysis was performed using One-way ANOVA as compared to the non-cleavable AK211 construct.

[0188] FIGS. 24A-24D show the results from studies testing the in vivo cleavage of the exemplary masked IL-2 polypeptide constructs AK168 (cleavable peptide sequence: MPYDLYHP; SEQ ID NO: 24) and AK209 (cleavable peptide sequence: VPLSLY; SEQ ID NO: 28). FIG. 24E shows results from a pharmacokinetic study of total plasma IgG concentration (μg/mL) for total levels of the AK167, AK168, and AK209 constructs, and for levels of non-cleaved forms of each construct.

[0189] FIGS. 25A-25D show results from an in vivo study that assessed vascular leakage using the exemplary masked IL-2 polypeptide construct AK111 or AK168, or the non-masked IL-2 polypeptide construct AK081 or AK167, or an anti-RSV control. FIG. 25A shows the percentage (%) of body weight loss, and FIGS. 25B, 25C, and 25D show the weight in grams of the liver, lung, and spleen, respectively, for each.

[0190] FIGS. 26A and 26B show results from an in vivo study that assessed vascular leakage as indicated by measuring the extent of dye leakage into liver and lung tissue following administration of the AK081, AK111, AK167, or AK168 construct, or an anti-RSV control. The extent of dye leakage into liver (FIG. 26A) and lung (FIG. 26B) was measured based on absorbance at 650 nm.

[0191] FIGS. 27A and 27B show results from an in vivo study that assessed vascular leakage as indicated by measuring the extent of mononuclear cell perivascular invasion into the liver and lung tissue following administration of the AK081, AK111, AK167, or AK168 construct, or an anti-RSV control. The average number of mononuclear cells in the liver (FIG. 27A) and the average number of mononuclear cells in the lung (FIG. 27B) depicted for each.

[0192] FIGS. 28A and 28B show results from a syngeneic tumor model study that assessed tumor volume and body weight over the course of treatment with the AK032, AK081, AK111, AK167, or AK168 construct, or an anti-RSV control. FIG. 28A shows data on tumor volume over the course of treatment, and FIG. 28B shows data on the percentage (%) change in body weight over the course of the treatment.

[0193] FIGS. 29A and 29B show AK471 with I253A FcRn mutation induced robust CD8 T cells expansion in the TME while remaining inactive in the periphery.

[0194] FIGS. 30A-30C show AK471 has slightly shorter half-life compared to aglyco-hIgG1

[0195] FIGS. 31A-31C show there is no evidence of cleavage or decapitation with AK471 in the plasma

[0196] FIGS. 32A and 32B show results of Example 5.

[0197] FIGS. 33A-33D show results of Example 5.

[0198] FIGS. 34A and 34B shows results of Example 6i. FIGS. 35A and 35B show results of Example 6ii. FIGS. 36A and 36B show results of Example 6iii. FIGS. 37A and 37B show results of Example 6iv. FIGS. 38A and 38B show results of Example 6v. FIGS. 39A and 39B show results of Example 6vi. FIGS. 40A-40D show results of Example 6vii. FIGS. 41A and 41B show results of Example 6viii. FIGS. 42A and 42B show results of Example 6ix. FIGS. 43A and 43B show results of Example 6x.

[0199] FIGS. 44A-44D and FIGS. 45A-45F show the results of a SDS-PAGE and HEK-Blue IL-2 bioassay using exemplary IL-15 constructs AK904 and AK910 that do not include a peptide substrate, and constructs AK932, AK938, AK930 and AK936 that do include a peptide substrate. FIGS. 44A-44D show the SDS-PAGE gel results. FIGS. 45A-45F show the HEK-Blue IL-2 bioassay results.

### DETAILED DESCRIPTION

[0200] By using a masking moiety, the systemic side effects of an administered IL-2 cytokine or functional fragment thereof can be reduced by interfering with the binding capability of the IL-2 cytokine or functional fragment thereof to its cognate receptor.

[0201] The IL-2 cytokine receptor is an IL-2 receptor complex that comprises three separate and non-covalently linked chains: the IL-2Rα chain (also referred to as CD25), the IL-2Rβ chain (also referred to as CD122), and the IL-2Rγ chain (also referred to as CD132). The three receptor chains can assemble in different combinations and orders to generate low, intermediate, and high affinity IL-2 receptors. The a chain alone binds IL-2 with low affinity, the combination of β and γ together form a complex that binds IL-2 with intermediate affinity, and combination of all three receptor chains (α, β and γ) form a complex that binds IL-2 with high affinity.

[0202] For instance, high-dose recombinant IL-2 (aldesleukin) has been approved by the FDA for the treatment of metastatic renal cell carcinoma and melanoma, but has been associated with severe cardiovascular, hepatic, pulmonary, gastrointestinal, neurologic, and haematological side effects. Preclinical studies showed, for instance, that IL-2-induced pulmonary edema is caused by the interaction between IL-2 and the IL-2Rα (CD25) subunit of the IL-2 receptor on lung endothelial cells, and that this IL-2-mediated pulmonary edema could be abrogated by interfering with the ability of the IL-2 to bind IL-2Rα. See Krieg et al. (2010) PNAS, 107(26): 11906-11911. Thus, in some embodiments, a masking moiety is employed that reduces or prevents binding of the IL-2 cytokine or functional fragment thereof to IL-2Rα. To further reduce systemic effects, in some embodiments, binding of the IL-2 cytokine or fragment thereof to the IL-2Rβ and/or IL-2Rγ subunits of the IL-2 receptor may also be reduced or prevented by the masking moiety in the masked cytokine.

[0203] By masking the IL-2 cytokine or functional fragment thereof using a linker that includes a proteolytically cleavable peptide, the binding capability that is interfered with by using the masking moiety can be restored by cleavage of the cleavable peptide at the tumor microenvironment. Thus, the masked IL-2 cytokines provided herein are engineered to precisely target pharmacological activity to the tumor microenvironment by exploiting one of the hallmarks of cancer, high local concentrations of active protease. This feature of the tumor microenvironment is used to transform a systemically inert molecule into a locally active IL-2 cytokine or functional fragment thereof in the form of an IL-2 cleavage product. Activation of the IL-2 cytokine or functional fragment thereof at the tumor microenvironment significantly reduces systemic toxicities that can be associated with drugs that are administered to a subject in active form. Thus, the masked IL-2 cytokines of the invention may be viewed as a pro-drug.

[0204] Masked IL-2 cytokines described herein have been found to show various advantageous properties. Masked IL-2 cytokines described anywhere herein have been found to be capable of activating immune cells (proliferation and expansion) upon proteolytic cleavage, preferentially in the tumor microenvironment and at lower levels in the periphery. Masked IL-2 cytokines described anywhere herein have been found to be 5 capable of promoting tumor eradication (i.e. show anti-tumor activity) and inhibition of metastasis upon proteolytic cleavage. Masked IL-2 cytokines described anywhere herein have been found to demonstrate advantageous prolonged drug exposure. Masked IL-2 cytokines described herein have been found to demonstrate advantageous stability. Masked IL-2 cytokines described herein have been found to demonstrate advantageous tolerability. Further, masked IL-2 cytokines described herein have been found to demonstrate advantageous potency.

### 1. ‘HETERODIMERIC’ MASKED CYTOKINES

[0205] Provided herein, in some embodiments, is a masked cytokine comprising a masking moiety in a first polypeptide chain and an IL-2 cytokine or functional fragment thereof in a second polypeptide chain. Such masked cytokines may be referred to as ‘heterodimeric’ masked cytokines.

[0206] In some embodiments, the masked cytokine comprises a protein heterodimer comprising:
[0207] a) a first polypeptide chain comprising a masking moiety linked to a first half-life extension domain via a first linker; and
[0208] b) a second polypeptide chain comprising an IL-2 cytokine or functional fragment thereof linked to a second half-life extension domain via a second linker,

[0209] wherein the first half-life extension domain is associated with the second half-life extension domain, and

[0210] wherein at least the first linker or the second linker comprises a proteolytically cleavable peptide.

[0211] The masking moiety, half-life extension domains, IL-2 cytokine or functional fragment thereof, linkers and type of association between the first half-life extension domain and the second half-life extension domain may be any one of those described herein, and any combination of those described herein.

[0212] In some embodiments, in the first polypeptide chain, the first half life extension domain is linked to the amino terminus of the first linker and the carboxy terminus of the first linker is linked to the amino terminus of the masking moiety and, in the second polypeptide chain, the second half life extension domain is linked to the amino terminus of the second linker and the carboxy terminus of the second linker is linked to the amino terminus of the IL-2 cytokine or functional fragment thereof. This is shown schematically N- to C-terminal in formulae 6 (first polypeptide chain) and 5 (second polypeptide chain) below:

N′HL1-L1-MM C′ (6)

N′HL2-L2-C C′ (5)

[0213] where HL1 is the first half life extension domain, L1 is the first linker, MM is the masking moiety, HL2 is the second half life extension domain, L2 is the second linker, and C is the IL-2 cytokine or functional fragment thereof.

[0214] 1.1 IL-2 Cytokines

[0215] Provided herein is an IL-2 cytokine or functional fragment thereof for use in a masked cytokine or cleavage product thereof. A cytokine plays a role in cellular signalling, particularly in cells of the immune system. IL-2 is an interleukin, which is a type of cytokine signalling molecule in the immune system that regulates activities of white blood cells.

[0216] In eukaryotic cells, naturally occurring IL-2 is synthesized as a precursor polypeptide of 153 amino acids, which has SEQ ID NO: 1. This is then processed into mature IL-2 by the removal of amino acid residues 1-20. This results in a mature form of IL-2 consisting of 133 amino acids (amino acid residues 21-153), which has SEQ ID NO: 2. “Functional fragments” of an IL-2 cytokine comprise a portion of a full length cytokine protein which retains or has modified cytokine receptor binding capability (e.g., within at least 50%, 80%, 90%, 95%, 96%, 97%, 98%, 99% or 100% activity compared to the full length cytokine protein). Cytokine receptor binding capability can be shown, for example, by the capability of a cytokine to bind to the cytokine's cognate receptor or a component thereof (e.g., one or more chain(s) of a heterotrimeric receptor complex).

[0217] In some embodiments, the IL-2 cytokine or functional fragment thereof is any naturally occurring interleukin-2 (IL-2) protein or modified variant thereof capable of binding to an interleukin-2 receptor, particularly the IL-2Rα chain. In the context of IL-2 cytokine binding, the target protein could be IL-2R (comprising the IL-2Rα, IL-2Rβ, and IL-2Rγ chains), the IL-2Rα chain, the IL-2Rβ chain, or the IL-2Rα/β dimeric complex. In some embodiments, the IL-2 cytokine or functional fragment thereof comprises the amino acid sequence of amino acid residues 21-153 of SEQ ID NO: 1. In some embodiments, the IL-2 polypeptide or functional fragment thereof comprises the amino acid sequence of mature IL-2, SEQ ID NO: 2.

[0218] In some embodiments, the IL-2 cytokine or functional fragment thereof comprises an amino acid sequence having at least one amino acid modification as compared to the amino acid sequence of SEQ ID NO: 2. Each of the at least one amino acid modifications can be any amino acid modification, such as a substitution, insertion, or deletion. In some embodiments, the IL-2 cytokine or functional fragment thereof comprises an amino acid sequence having at least 1, at least 2, at least 3, at least 4, at least 5, at least 6, at least 7, at least 8, at least 9, or at least 10 amino acid substitutions as compared to the amino acid sequence of SEQ ID NO: 2. In some embodiments, the IL-2 cytokine or functional fragment thereof comprises an amino acid sequence having at least 5 amino acid substitutions as compared to the amino acid sequence of SEQ ID NO: 2.

[0219] In some embodiments, the IL-2 cytokine or functional fragment thereof comprises an amino acid sequence having one or more amino acid substitutions as compared to the amino acid sequence of wild-type IL-2 of SEQ ID NO: 2 that reduces the affinity of the IL-2 peptide or functional fragment thereof for IL-2Rα (CD25). In some embodiments, the IL-2 cytokine or functional fragment thereof comprises an amino acid sequence having one or more amino acid substitutions as compared to the amino acid sequence of SEQ ID NO: 2, such that one or more of amino acid residues 38, 42, 45, and 62 is an alanine (A). In some embodiments, the IL-2 cytokine or functional fragment thereof comprises an amino acid sequence having one or more amino acid substitutions as compared to the amino acid sequence of SEQ ID NO: 2, such that amino acid residues 38, 42, 45, and 62 are an alanine (A).

[0220] In some embodiments, the IL-2 cytokine or functional fragment thereof comprises amino acid sequence substitution C125A as compared to the amino acid sequence of SEQ ID NO: 2.

[0221] In some embodiments, the IL-2 cytokine or functional fragment thereof comprises an amino acid sequence having one or more amino acid substitutions as compared to the amino acid sequence of SEQ ID NO: 2, such that amino acid residues 38, 42, 45, and 62 are an alanine (A) and amino acid residue 125 is a alanine (A). In some embodiments, the IL-2 cytokine or functional fragment thereof comprises an amino acid sequence having amino acid residues R38, F42, Y45, and E62 substituted for alanine in the amino acid sequence of SEQ ID NO: 2. In some embodiments, the IL-2 cytokine or functional fragment thereof comprises an amino acid sequence having amino acid residues R38, F42, Y45, and E62 substituted for alanine (A) and amino acid residue C125 substituted for alanine (A) in the amino acid sequence of SEQ ID NO: 2.

[0222] In some embodiments, the IL-2 cytokine or functional fragment thereof comprises the amino acid sequence of SEQ ID NO: 3. In some embodiments, the IL-2 cytokine or functional fragment thereof comprises an amino acid sequence having about or at least about 85%, 86%, 87%, 88%, 89%, 90%, 91%, 92%, 93%, 94%, 95%, 96%, 97%, 98%, or 99% sequence identity to the amino acid sequence of SEQ ID NO: 3.

[0223] In some embodiments, the IL-2 cytokine or functional fragment thereof has one or more amino acid residues e.g. residues 1-3 s removed as compared to the amino acid sequence of the mature IL-2 of SEQ ID 2, for the purpose of removing an O-glycosylation site. In some embodiments, the IL-2 cytokine or functional fragment thereof has one or more amino acid residues substituted as compared to the amino acid sequence of the mature IL-2 of SEQ ID 2, for the purpose of removing an O-glycosylation site. In some embodiments, the IL-2 cytokine or functional fragment thereof has one or more amino acid residues inserted, e.g. in the region of residues 1-3, as compared to the amino acid sequence of the mature IL-2 of SEQ ID 2, for the purpose of removing an O-glycosylation site. In some embodiments, the IL-2 cytokine or functional fragment thereof does not have an O-glycosylation site within residues 1-3.

[0224] 1.2 Masking Moieties

[0225] Provided herein is a masking moiety for use in a masked cytokine. It will be understood that the masking moiety is cleaved from the masked cytokine to form the cleavage product thereof. The masking moiety masks the IL-2 cytokine or functional fragment thereof in the masked cytokine thereby reducing or preventing binding of the IL-cytokine or functional fragment thereof to its cognate receptor. In some embodiments, the masking moiety reduces or prevents binding of the IL-2 cytokine or functional fragment thereof to IL-2Rα (CD25). In some embodiments, the masking moiety as provided herein refers to a moiety capable of binding to, or otherwise exhibiting an affinity for the IL-2 cytokine or functional fragment thereof, such as an anti-IL-2 antibody or IL-2 cognate receptor protein. Methods for determining the extent of binding of a protein (e.g., cytokine) to a cognate protein (e.g., cytokine receptor) are well known in the art.

[0226] In some embodiments, the masking moiety comprises an IL-2 cytokine receptor, or a subunit or functional fragment thereof.

[0227] In some embodiments, the masking moiety comprises IL-2Rβ (also referred to as CD122) or a fragment, portion, or variant thereof that retains or otherwise demonstrates an affinity to IL-2.

[0228] In some embodiments, the masking moiety comprises the amino acid sequence of SEQ ID NO: 4. In some embodiments, the masking moiety comprises an amino acid sequence having about or at least about 85%, 86%, 87%, 88%, 89%, 90%, 91%, 92%, 93%, 94%, 95%, 96%, 97%, 98%, or 99% sequence identity to the amino acid sequence of SEQ ID NO: 4. In some embodiments, the masking moiety comprises an amino acid sequence having the amino acid sequence of SEQ ID NO: 4 with one to four amino acid substitutions. In some embodiments, the masking moiety comprises an amino acid sequence having the amino acid sequence of SEQ ID NO: 4 with one or two amino acid substitutions.

[0229] In some embodiments, the IL-2Rβ or a fragment, portion or variant thereof has mutation at amino acid position C122 as compared to IL-2Rβ of SEQ ID NO: 4.

[0230] In some embodiments, the IL-2Rβ or a fragment, portion or variant thereof has mutation C122S at amino acid position 122 as compared to IL-2Rβ of SEQ ID NO: 4.

[0231] In some embodiments, the masking moiety comprises an amino acid sequence of SEQ ID NO: 4 with a C122 mutation.

[0232] In some embodiments, the masking moiety comprises an amino acid sequence of SEQ ID NO: 4 with a C122S mutation.

[0233] In some embodiments, the IL-2Rβ or a fragment, portion or variant thereof has mutation at amino acid position C168 as compared to IL-2Rβ of SEQ ID NO: 4.

[0234] In some embodiments, the IL-2Rβ or a fragment, portion or variant thereof has mutation C168S at amino acid position 168 as compared to IL-2Rβ of SEQ ID NO: 4.

[0235] In some embodiments, the masking moiety comprises an amino acid sequence of SEQ ID NO: 4 with a C168 mutation.

[0236] In some embodiments, the masking moiety comprises an amino acid sequence of SEQ ID NO: 4 with a C168S mutation.

[0237] The masked cytokine of any one of claims, wherein the IL-2Rβ or a fragment, portion or variant thereof has mutation at amino acid positions C122 and C168 as compared to IL-2Rβ of SEQ ID NO: 4.

[0238] The masked cytokine of any one of claims, wherein the IL-2Rβ or a fragment, portion or variant thereof has mutation C122S and C168S as compared to IL-2Rβ of SEQ ID NO: 4.

[0239] In some embodiments, the masking moiety comprises an amino acid sequence of SEQ ID NO: 5.

[0240] 1.3 Linkers

[0241] Provided herein are linkers for use in a masked cytokine or cleavage product thereof. A linker as provided herein refers to a peptide of two more amino acids that is used to link two functional components together in the masked cytokines described herein.

[0242] The masked cytokine comprises a first linker and a second linker, where at least the first linker or the second linker comprises a proteolytically cleavable peptide.

[0243] In some embodiments, the second linker comprises a proteolytically cleavable peptide (linker herein referred to as a ‘proteolytically cleavable linker’) and the first linker does not comprise a proteolytically cleavable peptide (linker herein referred to as a ‘non-proteolytically cleavable linker’). In some embodiments, the first polypeptide chain comprises formula 7 and the second polypeptide chain comprises formula 8 below:

N′HL1-non-cleavable L1-MM C′ (7)

N′HL2-cleavable L2-C C′ (8)

[0244] In some embodiments, the first linker comprises a proteolytically cleavable peptide (linker herein referred to as a ‘proteolytically cleavable linker’ or ‘cleavable linker’) and the second linker does not comprise a proteolytically cleavable peptide (linker herein referred to as a ‘non-proteolytically cleavable linker’ or ‘non-cleavable linker’). In some embodiments, the first polypeptide chain comprises formula 9 and the second polypeptide chain comprises formula 10 below:

N′HL1-cleavable L1-MM C′ (9)

N′HL2-non-cleavable L2-C C′ (10)

[0245] The non-cleavable linkers and cleavable linkers of some embodiments are described in more detail below.

[0246] 1.3.1 Non-Proteolytically Cleavable Linkers

[0247] In some embodiments, the non-cleavable linker is between 3 and 18 amino acids in length.

[0248] In some embodiments, the non-cleavable linker is between 3 and 8 amino acids in length. In some embodiments, the non-cleavable linker is between 4 and 6 amino acids in length.

[0249] In some embodiments, the non-cleavable linker is rich in amino acid residues G, S and P.

[0250] In some embodiments, the non-cleavable linker only includes amino acid residue types selected from the group consisting of G, S and P.

[0251] In some embodiments, the non-cleavable linker includes a ‘GS’ repeat.

[0252] In some embodiments, the non-cleavable linker includes an N′ terminal ‘P’ residue.

[0253] In some embodiments, the non-cleavable linker comprises an amino acid sequence as shown in SEQ ID NO: 14 (PGSGS).

[0254] In some embodiments, the non-cleavable linker comprises an amino acid sequence as shown in SEQ ID NO: 23 (GGSSPPGGGSSGGGSGP).

[0255] In some embodiments, the non-cleavable linker comprises an amino acid sequence GGS.

[0256] In some embodiments, wherein the second linker comprises a proteolytically cleavable peptide such that the second linker is a proteolytically cleavable linker and the first linker does not comprise a proteolytically cleavable peptide such that the first linker is a non-proteolytically cleavable linker, the non-cleavable linker is between 3 and 8 amino acids in length. In some embodiments, the non-cleavable linker is between 4 and 6 amino acids in length. In some embodiments, the non-cleavable linker comprises an amino acid sequence as shown in SEQ ID NO: 14 (PGSGS).

[0257] In some embodiments, wherein the first linker comprises a proteolytically cleavable peptide such that the first linker is a proteolytically cleavable linker and the second linker does not comprise a proteolytically cleavable peptide such that the second linker is a non-proteolytically cleavable linker, the non-cleavable linker is between 3 and 18 amino acids in length. In some embodiments, the non-cleavable linker comprises an amino acid sequence as shown in SEQ ID NO: 23 (GGSSPPGGGSSGGGSGP).

[0258] In some embodiments, wherein the second linker comprises a proteolytically cleavable peptide such that the second linker is a proteolytically cleavable linker and the first linker does not comprise a proteolytically cleavable peptide such that the first linker is a non-proteolytically cleavable linker, the non-cleavable linker is between 3 and 8 amino acids in length. In some embodiments, the non-cleavable linker comprises an amino acid sequence GGS.

[0259] In some embodiments, it is desirable for the first and second polypeptide chains to be of the same or a similar length to facilitate the first half life extension domain associating with the second half life extension domain and the masking moiety masking the IL-2 cytokine or functional fragment thereof in the assembled construct. As such where the masking moiety is a shorter amino acid sequence than the IL-2 cytokine or functional fragment thereof, the difference in length may be compensated fully or in part by using a longer linker L1.

[0260] 1.3.2 Proteolytically Cleavable Linkers In some embodiments, the cleavable linker is from 10 to 25 amino acids in length.

[0261] In some embodiments, the cleavable linker comprises a proteolytically cleavable peptide (CP) flanked on both sides by a spacer domain (SD) as shown in formula 11:

SD-CP-SD (11)

[0262] Cleavable Peptides

[0263] The cleavable linker comprises a cleavable peptide.

[0264] A cleavable peptide is a polypeptide that includes a protease cleavage site, such that the cleavable peptide is proteolytically cleavable. Proteases are enzymes that cleave and hydrolyse the peptide bonds between two specific amino acid residues of target substrate proteins. A “cleavage site” as used herein refers to a recognizable site for cleavage of a portion of the cleavable peptide found in any of the linkers that comprise a cleavable peptide described herein. Thus, a cleavage site may be found in the sequence of a cleavable peptide as described herein. In some embodiments, the cleavage site is an amino acid sequence that is recognized and cleaved by a cleaving agent.

[0265] In some embodiments, the protease cleavage site is a tumor-associated protease cleavage site. A “tumor-associated protease cleavage site” as provided herein is an amino acid sequence recognized by a protease whose expression is specific or upregulated for a tumor cell or tumor cell environment thereof.

[0266] The tumor cell environment is complex and can comprise multiple different proteases. As such, the precise site at which a given cleavable peptide will be cleaved in the tumor cell environment may vary between tumor types, between patients with the same tumor type and even between cleavage products formed in the same tumor dependent on the specific tumor cell environment. Moreover, even after cleavage, further modification of the initial cleavage product, e.g. by removal of one or two terminal amino acids, may occur by the further action of proteases in the tumor cell environment. A distribution of cleavage products can thus be expected to form in the tumor cell environment of a patient following administration of a single structure of a masked cytokine as described herein.

[0267] It will be understood that a cleavage site as referred to herein refers to a site between two specific amino acid residues within the cleavable peptide that are a target for a protease known to be associated with a tumor cell environment. In this sense, there may be more than one cleavage site present in a cleavable peptide as described herein where different proteases cleave the cleavable peptide at different cleavage sites. It is also possible that more than one protease may act on the same cleavage site within a cleavable peptide. Discussion of protease cleavage sites can be found in the art.

[0268] Thus, the cleavable peptides disclosed herein may be cleaved by one or more proteases.

[0269] In some embodiments, the cleavable peptide is a substrate for a protease that is co-localized in a region or a tissue expressing the IL-2 cytokine receptor, particularly IL-2Rα.

[0270] In some embodiments, the cleavable peptide is a 5-mer (i.e. peptide 5 amino acids in length), 6-mer (i.e. peptide 6 amino acids in length), 7-mer (i.e. peptide 7 amino acids in length), 8-mer (i.e. peptide 8 amino acids in length), 9-mer (i.e. peptide 9 amino acids in length), 10-mer (i.e. peptide 10 amino acids in length), 11-mer (i.e. peptide 11 amino acids in length), 12-mer (i.e. peptide 12 amino acids in length), 13-mer (i.e. peptide 13 amino acids in length), 14-mer (i.e. peptide 14 amino acids in length), 15-mer (i.e. peptide 15 amino acids in length), 16-mer (i.e. peptide 16 amino acids in length), 17-mer (i.e. peptide 17 amino acids in length), or 18-mer (i.e. peptide 18 amino acids in length).

[0271] In some embodiments, the cleavable peptide is from 5 to 18 amino acids in length. In some embodiments, the cleavable peptide is from 6 to 10 amino acids in length.

[0272] In some embodiments, the cleavable peptide within the cleavable linker comprises an amino acid sequence selected from the group consisting of SEQ ID NOs: 24, 25, 26, 27 and 28. In some embodiments, the cleavable peptide within the cleavable linker comprises an amino acid sequence selected from the group consisting of SEQ ID NOs: 24, 25, 26, 27, 28 and 118 and 119.

| | Sequence |
|---|---|
| SEQ | (* indicates a cleavage site |
| ID NO: | within the cleavable peptide) |
| 24 | MPYD*LYHP |
| 25 | DSGG*FMLT |
| 26 | HEQ*LTV |
| 27 | RAAA*VKSP |
| 28 | VPLS*LY |
| 118 | DLLA*VVAAS |
| 119 | ISSGLL*SG*RS |

[0273] Purely by way of example, in the above table, * indicates a known or observed protease cleavage site within the cleavable peptide.

[0274] In some embodiments, the cleavable peptide comprises an amino acid sequence of SEQ ID NO: 24. In some embodiments, the cleavable peptide comprises an amino acid sequence of SEQ ID NO: 25. In some embodiments, the cleavable peptide comprises an amino acid sequence of SEQ ID NO: 26. In some embodiments, the cleavable peptide comprises an amino acid sequence of SEQ ID NO: 27. In some embodiments, the cleavable peptide comprises an amino acid sequence of SEQ ID NO: 28, for example the cleavable peptide may comprise an amino acid sequence of SEQ ID NO: 324 (VPLSLYSG). In some embodiments, the cleavable peptide comprises an amino acid sequence of SEQ ID NO: 118. In some embodiments, the cleavable peptide comprises an amino acid sequence of SEQ ID NO: 119, for example the cleavable peptide may comprise an amino acid sequence of SEQ ID NO: 323 (ISSGLLSGRSDQP).

[0275] In some embodiments, the cleavable peptide consists of an amino acid sequence selected from the group consisting of SEQ ID NOs: 24, 25, 26, 27 and 28. In some embodiments, the cleavable peptide consists of an amino acid sequence selected from the group consisting of SEQ ID NOs: 24, 25, 26, 27, 28, 118 and 119. In some embodiments, the cleavable peptide consists of an amino acid sequence of SEQ ID NO: 24. In some embodiments, the cleavable peptide consists of an amino acid sequence of SEQ ID NO: 25. In some embodiments, the cleavable peptide consists of an amino acid sequence of SEQ ID NO: 26. In some embodiments, the cleavable peptide consists of an amino acid sequence of SEQ ID NO: 27. In some embodiments, the cleavable peptide consists of an amino acid sequence of SEQ ID NO: 28. In some embodiments, the cleavable peptide consists of an amino acid sequence of SEQ ID NO: 118. In some embodiments, the cleavable peptide consists of an amino acid sequence of SEQ ID NO: 119. In some embodiments, the cleavable peptide consists of an amino acid sequence of SEQ ID NO: 323 (ISSGLLSGRSDQP). In some embodiments, the cleavable peptide consists of an amino acid sequence of SEQ ID NO: 324 (VPLSLYSG).

[0276] Cleavable peptides having an amino acid sequence as shown in SEQ ID NOs: 118 or 119 have been found to demonstrate very specific cleavage in the tumor cell environment compared to non-tumor cell environment. Thus, when these cleavable peptides are incorporated into a masked IL-2 cytokine as disclosed anywhere herein, any systemic side effects of the administered IL-2 cytokine or functional fragment thereof may be further reduced.

[0277] Spacer Domains

[0278] A spacer domain may consist of one or more amino acids. The function of the spacer domains, where present, is to link the proteolytically cleavable peptide (CP) to the other functional components in the constructs described herein.

[0279] It will be understood that spacer domains do not alter the biological interaction of the proteolytically cleavable peptide with proteases in the tumor-cell environment or in non-tumor cell environment. In other words, even in the presence of spacer domains the inventive proteolytically cleavable peptides disclosed herein retain their advantageous tumor specificity.

[0280] In some embodiments, the spacer domains flanking the proteolytically cleavable peptide are different.

[0281] In some embodiments, the spacer domains are rich in amino acid residues G, S and P.

[0282] In some embodiments, the spacer domains only includes amino acid residue types selected from the group consisting of G, S and P.

[0283] In some embodiments, the cleavable linker comprises formula 12:

N′SD1-CP-SD2 C′ (12)

[0284] where SD1 is a first spacer domain and SD2 is a second spacer domain.

[0285] In some embodiments, the cleavable linker comprises formula 12:

N′SD1-CP-SD2 C′ (12)

[0286] In some embodiments, the first polypeptide chain comprises formula 7 and the second polypeptide chain comprises formula 13 below:

N′HL1-non-cleavable L1-MM C′ (7)

N′HL2-SD1-CP-SD2-C C′ (13)

[0287] In some embodiments, the first polypeptide chain comprises formula 14 and the second polypeptide chain comprises formula 10 below:

N′HL1-SD1-CP-SD2-MM C′ (14)

N′HL2-non-cleavable L2-C C′ (10)

[0288] In some embodiments, SD1 consists of a glycine (G).

[0289] In some embodiments, the N-terminus of SD1 is a glycine (G).

[0290] In some embodiments, the first spacer domain (SD1) is between 3 and 10 amino acids in length. In some embodiments, the first spacer domain (SD1) is between 4 and 9 amino acids in length. In some embodiments, the first spacer domain (SD1) is between 3 and 6 amino acids in length.

[0291] In some embodiments, SD1 comprises SEQ ID NO: 32, 33, 34, 35, 36 or 37. In some embodiments, SD1 comprises SEQ ID NO: 32, 33, 34, 35, 36, 120, 121, 122, 123 or 124. In some embodiments, SD1 comprises SEQ ID NO: 32, 33, 34, 35, 36, 120, 121, 122, 123, 124, 179 (PSGSSPG) or 185 (SGSPS).

[0292] In some embodiments, SD1 consists of SEQ ID NO: 32, 33, 34, 35, 36 or 37. In some embodiments, SD1 consists of SEQ ID NO: 32, 33, 34, 35, 36, 120, 121, 122, 123 or 124. In some embodiments, SD1 consists of SEQ ID NO: 32, 33, 34, 35, 36, 120, 121, 122, 123, 124, 179 (PSGSSPG) or 185 (SGSPS).

| SEQ ID NO of SD1 | Sequence |
|---|---|
| 32 | GGSSPP |
| 33 | GSGP |
| 34 | GSPG |
| 35 | GGSG |
| 36 | GPPSGSSPG |
| 37 | GPPSGSSP |
| 120 | GGPS |
| 121 | GSGPS |
| 122 | GSSGGP |
| 123 | GSP |
| 124 | GSGSPS |
| 179 | PSGSSPG |
| 185 | SGSPS |

[0293] In some embodiments, the SD2 consists of GP.

[0294] In some embodiments, the C-terminus sequence of SD2 is -GP C′

[0295] In some embodiments, the sequence of the C-terminus of SD2 is SEQ ID NO: 29.

[0296] In some embodiments, the second spacer domain (SD2) is between 3 and 6 amino acids in length.

[0297] In some embodiments, SD2 comprises SEQ ID NO: 29, 30 or 31.

[0298] In some embodiments, SD2 consists of SEQ ID NO: 29, 30 or 31.

| SEQ ID NO of SD2 | Sequence |
|---|---|
| 29 | SGP |
| 30 | SGGG |
| 31 | GSGGG |

[0299] Exemplary combinations of SD1 and SD2 in a cleavable linker are shown below:

| Linker structure | SD1 sequence | SD2 sequence |
|---|---|---|
| SD1-CP-SD2 | GPPSGSSPG | SGGG |
| SD1-CP-SD2 | GPPSGSSPG | GSGGG |
| SD1-CP-SD2 | GPPSGSSP | SGGG |
| SD1-CP-SD2 | GGSSPP | SGP |
| SD1-CP-SD2 | GSPG | SGP |
| SD1-CP-SD2 | GGSG | SGP |
| SD1-CP-SD2 | GSGP | SGP |
| SD1-CP-SD2 | GGPS | SGP |
| SD1-CP-SD2 | GSGPS | SGP |
| SD1-CP-SD2 | GSSGGP | SGP |
| SD1-CP-SD2 | GSP | SGP |
| SD1-CP-SD2 | GSGSPS | SGP |
| SD1-CP-SD2 | G | SGP |

[0300] In some embodiments, the proteolytically cleavable linker comprises SD1-CP-SD2 where SD1 is a first spacer domain, CP is a cleavable peptide and SD2 is a second spacer domain, and wherein CP has an amino acid sequence as shown in SEQ ID NO: 119. In some embodiments, the spacer domains are rich in amino acid residues G, S and P. In some embodiments, the spacer domains only include amino acid residue types selected from the group consisting of G, S and P.

[0301] In some embodiments, the proteolytically cleavable linker comprises SD1-CP-SD2 where SD1 is a first spacer domain, CP is a cleavable peptide and SD2 is a second spacer domain, and wherein CP has an amino acid sequence as shown in SEQ ID NO: 323. In some embodiments, the spacer domains are rich in amino acid residues G, S and P. In some embodiments, the spacer domains only include amino acid residue types selected from the group consisting of G, S and P.

[0302] In some embodiments, the proteolytically cleavable linker comprises SD1-CP-SD2 where SD1 is a first spacer domain, CP is a cleavable peptide and SD2 is a second spacer domain, and wherein CP has an amino acid sequence as shown in SEQ ID NO: 118 and SD2 has an amino acid sequence as shown in SEQ ID NO: 29. In some embodiments, the SD1 is from 3 to 6 amino acids in length. In some embodiments, the spacer domains are rich in amino acid residues G, S and P. In some embodiments, the spacer domains only include amino acid residue types selected from the group consisting of G, S and P.

[0303] In some embodiments, the proteolytically cleavable linker comprises SD1-CP-SD2 where SD1 is a first spacer domain, CP is a cleavable peptide and SD2 is a second spacer domain, and wherein CP has an amino acid sequence as shown in SEQ ID NO: 119 and SD2 has an amino acid sequence as shown in SEQ ID NO: 29. In some embodiments, the SD1 is from 3 to 6 amino acids in length. In some embodiments, wherein the spacer domains are rich in amino acid residues G, S and P. In some embodiments, the spacer domains only include amino acid residue types selected from the group consisting of G, S and P.

[0304] Exemplary cleavable linkers are shown below:

| SEQ ID NO of | |
|---|---|
| Cleavable | Cleavable linker sequence |
| linker | (cleavable peptide shown in bold) |
| 15 | GPPSGSSPGDSGGFMLTSGGG |
| 16 | GPPSGSSPGVPLSLYGSGGG |
| 17 | GPPSGSSPMPYDLYHPSGGG |
| 18 | GGSSPPMPYDLYHPSGP |
| 19 | GSPGVPLSLYSGP |
| 20 | GGSGRAAAVKSPSGP |
| 21 | GGSGHEQLTVSGP |
| 22 | GSGPDSGGFMLTSGP |
| 115 | GGPSDLLAVVAASSGP |
| 116 | GSGPSDLLAVVAASSGP |
| 117 | GSSGGPDLLAVVAASSGP |
| 112 | GSPDLLAVVAASSGP |
| 113 | GSPGDLLAVVAASSGP |
| 114 | GSGSPSDLLAVVAASSGP |
| 175 | GISSGLLSGRSDQPSGP |
| 177 | GISSGLLSGRSSGP |

[0305] In some embodiments, the cleavable linker comprises SEQ ID NO: 19.

[0306] In some embodiments, the cleavable linker comprises SEQ ID NO: 17.

[0307] In some embodiments, the cleavable linker comprises SEQ ID NO: 19 and the non-cleavable linker comprises SEQ ID NO: 14.

[0308] In some embodiments, the cleavable linker comprises SEQ ID NO: 115 and the non-cleavable linker comprises SEQ ID NO: 14.

[0309] In some embodiments, the cleavable linker comprises SEQ ID NO: 116 and the non-cleavable linker comprises SEQ ID NO: 14.

[0310] In some embodiments, the cleavable linker comprises SEQ ID NO: 117 and the non-cleavable linker comprises SEQ ID NO: 14.

[0311] In some embodiments, the cleavable linker comprises SEQ ID NO: 17 and the non-cleavable linker comprises SEQ ID NO: 23.

[0312] In some embodiments, the cleavable linker comprises SEQ ID NO: 112 and the non-cleavable linker comprises SEQ ID NO: 23.

[0313] In some embodiments, the cleavable linker comprises SEQ ID NO: 113 and the non-cleavable linker comprises SEQ ID NO: 23.

[0314] In some embodiments, the cleavable linker comprises SEQ ID NO: 114 and the non-cleavable linker comprises SEQ ID NO: 23.

[0315] In some embodiments, wherein the second linker comprises a proteolytically cleavable peptide such that the second linker is a proteolytically cleavable linker and the first linker does not comprise a proteolytically cleavable peptide such that the first linker is a non-proteolytically cleavable linker, the cleavable linker comprises SEQ ID NO: 115 and the non-cleavable linker comprises SEQ ID NO: 14. In some embodiments, the cleavable linker comprises SEQ ID NO: 116 and the non-cleavable linker comprises SEQ ID NO: 14. In some embodiments, the cleavable linker comprises SEQ ID NO: 117 and the non-cleavable linker comprises SEQ ID NO: 14.

[0316] In some embodiments, wherein the first linker comprises a proteolytically cleavable peptide such that the first linker is a proteolytically cleavable linker and the second linker does not comprise a proteolytically cleavable peptide such that the second linker is a non-proteolytically cleavable linker, the cleavable linker comprises SEQ ID NO: 112 and the non-cleavable linker comprises SEQ ID NO: 23. In some embodiments, the cleavable linker comprises SEQ ID NO: 113 and the non-cleavable linker comprises SEQ ID NO: 23. In some embodiments, the cleavable linker comprises SEQ ID NO: 114 and the non-cleavable linker comprises SEQ ID NO: 23.

[0317] In some embodiments, wherein the second linker comprises a proteolytically cleavable peptide such that the second linker is a proteolytically cleavable linker and the first linker does not comprise a proteolytically cleavable peptide such that the first linker is a non-proteolytically cleavable linker, then the proteolytically cleavable peptide linker does not have the amino acid sequence GGSGISSGLLSGRSSSGP or GISSGLLSGRSSSGP.

[0318] In some embodiments, the proteolytically cleavable linker comprises a cleavable peptide consisting of an amino acid sequence of SEQ ID NO: 118. (DLLA*VVAAS).

[0319] In some embodiments, the proteolytically cleavable linker comprises a cleavable peptide consisting of an amino acid sequence of SEQ ID NO: 119. (ISSGLL*SGRS).

[0320] Linker combinations disclosed in exemplary AK molecules may be used with any IL-2 cytokine or fragment thereof disclosed herein. Linker combinations disclosed in exemplary AK molecules may be used with any masking moiety disclosed herein. Linker combinations disclosed in exemplary AK molecules may be used with any half-life extension domains. In other words, the linker disclosed in exemplary AK molecules may be used in combinations with any IL-2 cytokine or fragment thereof disclosed herein, masking moiety disclosed herein and/or half-life extension domain disclosed herein.

[0321] 1.4 Half-Life Extension Domains

[0322] Provided herein are half life extension domains for use in a masked cytokine or cleavage product thereof. A long half-life in vivo is important for therapeutic proteins. Unfortunately, cytokines that are administered to a subject generally have a short half-life since they are normally cleared rapidly from the subject by mechanisms including clearance by the kidney and endocytic degradation. Thus, in the masked cytokine provided herein, a half-life extension domain is linked to the masked cytokine for the purpose of extending the half-life of the cytokine in vivo.

[0323] The term “half-life extension domain” refers to a domain that extends the half-life of the target component in serum. The term “half-life extension domain” encompasses, for example, antibodies and antibody fragments.

[0324] The masked cytokine provided herein comprises a first half-life extension domain that is associated with a second half-life extension domain.

[0325] In some embodiments, the first half-life extension domain and the second half-life extension domain are non-covalently associated.

[0326] In some embodiments, the first half-life extension domain and the second half-life extension domain are covalently bound.

[0327] In some embodiments, the first half-life extension domain is linked to the second half-life extension domain via one or more disulphide bonds.

[0328] In some embodiments, the first half-life extension domain is linked to the second half-life extension domain via a half life extension domain linker (HLDL).

[0329] In some embodiments, the first half-life extension domain and the second half-life extension domain are non-covalently associated and, further, the first half-life extension domain is linked to the second half-life extension domain via a disulphide bond.

[0330] In some embodiments, the first half-life extension domain comprises a first antibody or fragment thereof, and second half-life extension domain comprises a second antibody or fragment thereof.

[0331] An antibody or fragment thereof that is capable of FcRn-mediated recycling, can be reduce or otherwise delay clearance of the masked cytokine from a subject, thereby prolonging the half-life of the administered masked cytokine. In some embodiments, the antibody or fragment thereof is any antibody or fragment thereof that is capable of FcRn-mediated recycling, such as any heavy chain polypeptide or portion thereof (e.g., Fc domain or fragment thereof) that is capable of FcRn-mediated recycling.

[0332] The antibody or fragment thereof can be any antibody or fragment thereof. However, in some embodiments of a masked cytokine comprising a first half-life extension domain and a second half-life extension domain, either the first half-life extension domain or the second half-life extension domain may comprise an antibody or fragment thereof that does not bind to the FcRn receptor, such as a light chain polypeptide. For example, in some embodiments of the masked cytokine, a first half-life extension domain comprises an antibody or fragment thereof that comprises a light chain polypeptide or portion thereof that does not directly interact with the FcRn receptor, but the masked cytokine nonetheless has an extended half-life due to comprising a second half-life extension domain that is capable of interacting with the FcRn receptor, such as by comprising a heavy chain polypeptide. It is recognized in the art that FcRn-mediated recycling requires binding of the FcRn receptor to the Fc region of the antibody or fragment thereof. For instance, studies have shown that residues I253, S254, H435, and Y436 (numbering according to the Kabat EU index numbering system) are important for the interaction between the human Fc region and the human FcRn complex. See, e.g., Firan, M., et al., Int. Immunol. 13 (2001) 993-1002; Shields, R. L., et al, J. Biol. Chem. 276 (2001) 6591-6604). Various mutants of residues 248-259, 301-317, 376-382, and 424-437 (numbering according to the Kabat EU index numbering system) have also been examined and reported. Yeung, Y. A., et al. (J. Immunol. 182 (2009) 7667-7671.

[0333] In some embodiments, the antibody or fragment thereof comprises either a heavy chain polypeptide or a light chain polypeptide. In some embodiments, the antibody or fragment thereof comprises a portion of either a heavy chain polypeptide or a light chain polypeptide. In some embodiments, the antibody or fragment thereof comprises an Fc domain or fragment thereof. In some embodiments, the antibody or fragment thereof comprises a CH2 and CH3 domain or a fragment thereof. In some embodiments, the antibody or fragment thereof comprises the constant domain of the heavy chain polypeptide. In some embodiments, the antibody or fragment thereof comprises the constant domain of the light chain polypeptide. In some embodiments, the antibody or fragment thereof comprises a heavy chain polypeptide or fragment thereof (e.g., an Fc domain or fragment thereof). In some embodiments, the antibody or fragment thereof comprises a light chain polypeptide.

[0334] In some embodiments, the first half-life extension domain comprises a first Fc domain or a fragment thereof and the second half-life extension domain comprises a second Fc domain or a fragment thereof.

[0335] In some embodiments, the first and/or second Fc domains each contain one or more modifications that promote the non-covalent association of the first and the second half-life extension domains. In some embodiments, the first half-life extension domain comprises an IgG1 Fc domain or fragment thereof including the mutations Y349C; T366S; L38A; and Y407V to form a ‘hole’ in the first half-life extension domain and the second half-life extension domain comprises an IgG1 Fc domain or fragment thereof including the mutations S354C and T366W to form the ‘knob’ in the second half-life extension domain.

[0336] In some embodiments, the first and second half-life extension domains are each an IgG1, IgG2 or IgG4 Fc domain or fragment thereof. In some embodiments, the first and second half-life extension domains are each an IgG1 Fc domain or fragment thereof. Human IgG1 Immunoglobulin heavy constant gamma 1 has the sequence:

(SEQ ID NO: 6)
[sequence omitted]

[0337] In some embodiments, the first and second half-life extension domains are derived from the sequence for human IgG1 Immunoglobulin heavy constant gamma 1 having SEQ ID NO: 6 (the ‘parent sequence’), such that the first and second half-life extension domains each comprise SEQ ID NO: 6 or fragment thereof, with one or more amino acid modifications.

[0338] In some embodiments, the first and second half-life extension domains each comprise the portion of SEQ ID NO: 6 shown in bold above, optionally with one or more amino acid modifications, i.e.:

(SEQ ID NO: 7)
DKTHTCPPCPAPELLGG
PSVFLFPPKPKDTLMISRTPEVTCVVVDVSHEDPEVKFNWYVDGVEVHNA
KTKPREEQYNSTYRVVSVLTVLHQDWLNGKEYKCKVSNKALPAPIEKTIS
KAKGQPREPQVYTLPPSRDELTKNQVSLTCLVKGFYPSDIAVEWESNGQP
ENNYKTTPPVLDSDGSFFLYSKLTVDKSRWQQGNVFSCSVMHEALHNHYT
QKSLSLSPG

[0339] In some embodiments, the first and second half-life extension domains comprise SEQ ID NO: 7 with amino substitutions to promote association of the first and second half-life extension domains according to the ‘knob into holes’ approach. In some embodiments, the sequence SEQ ID NO: 7 contains mutations Y349C; T366S; L38A; and Y407V (numbered according to the Kabat EU numbering system) to form the ‘hole’ in the first half-life extension domain and mutations S354C and T366W (numbered according to the Kabat EU numbering system) to form the ‘knob’ in the second half-life extension domain. These modified sequences have SEQ ID NOs 8 and 11 shown below:

[0340] First Half-Life Extension Domain (Y349C; T366S; L38A; and Y407V) SEQ ID NO 8:

DKTHTCPPCPAPELLGGPSVFLFPPKPKDTLMISRTPEVTCVVVDVSHE
DPEVKFNWYVDGVEVHNAKTKPREEQYNSTYRVVSVLTVLHQDWL
NGKEYKCKVSNKALPAPIEKTISKAKGQPREPQVCTLPPSRDELTKNQ
VSLSCAVKGFYPSDIAVEWESNGQPENNYKTTPPVLDSDGSFFLVSKL
TVDKSRWQQGNVFSCSVMHEALHNHYTQKSLSLSPG

[0341] Second Half-Life Extension Domain (S354C and T366W) SEQ ID NO 11:

DKTHTCPPCPAPELLGGPSVFLFPPKPKDTLMISRTPEVTCVVVDVSH
EDPEVKFNWYVDGVEVHNAKTKPREEQYNSTYRVVSVLTVLHQDW
LNGKEYKCKVSNKALPAPIEKTISKAKGQPREPQVYTLPPCRDELTK
NQVSLWCLVKGFYPSDIAVEWESNGQPENNYKTTPPVLDSDGSFFL
YSKLTVDKSRWQQGNVFSCSVMHEALHNHYTQKSLSLSPG

[0342] In some embodiments, the first and second half-life extension domains each further comprise amino substitution N297A, numbered according to the Kabat EU numbering system:

[0343] First Half-Life Extension Domain (Y349C; T366S; L38A; Y407V and N297A) SEQ ID NO 9:

DKTHTCPPCPAPELLGGPSVFLFPPKPKDTLMISRTPEVTCVVVDVSHE
DPEVKFNWYVDGVEVHNAKTKPREEQYASTYRVVSVLTVLHQDWL
NGKEYKCKVSNKALPAPIEKTISKAKGQPREPQVCTLPPSRDELTKNQ
VSLSCAVKGFYPSDIAVEWESNGQPENNYKTTPPVLDSDGSFFLVSKL
TVDKSRWQQGNVFSCSVMHEALHNHYTQKSLSLSPG

[0344] Second Half-Life Extension Domain (S354C, T366W and N297A) SEQ ID NO 12:

DKTHTCPPCPAPELLGGPSVFLFPPKPKDTLMISRTPEVTCVVVDVSH
EDPEVKFNWYVDGVEVHNAKTKPREEQYASTYRVVSVLTVLHQDW
LNGKEYKCKVSNKALPAPIEKTISKAKGQPREPQVYTLPPCRDELTK
NQVSLWCLVKGFYPSDIAVEWESNGQPENNYKTTPPVLDSDGSFFL
YSKLTVDKSRWQQGNVFSCSVMHEALHNHYTQKSLSLSPG

[0345] In some embodiments, the first and second half-life extension domains each further comprise the amino substitution I253A, numbered according to the Kabat EU numbering system.

[0346] In some embodiments, the first and second half-life extension domains each further comprise both the amino substitutions N297A and I253A, numbered according to the Kabat EU numbering system:

[0347] First Half-Life Extension Domain (Y349C; T366S; L38A; Y407V, N297A and I253A) SEQ ID NO 10:

DKTHTCPPCPAPELLGGPSVFLFPPKPKDTLMASRTPEVTCVVVDVSHED
PEVKFNWYVDGVEVHNAKTKPREEQYASTYRVVSVLTVLHQDWLNGKE
YKCKVSNKALPAPIEKTISKAKGQPREPQVCTLPPSRDELTKNQVSLSCA
VKGFYPSDIAVEWESNGQPENNYKTTPPVLDSDGSFFLVSKLTVDKSRW
QQGNVFSCSVMHEALHNHYTQKSLSLSPG

[0348] Second Half-Life Extension Domain (S354C, T366W, N297A and I253A) SEQ ID NO 13:

DKTHTCPPCPAPELLGGPSVFLFPPKPKDTLMASRTPEVTCVVVDVSHED
PEVKFNWYVDGVEVHNAKTKPREEQYASTYRVVSVLTVLHQDWLNGKEY
KCKVSNKALPAPIEKTISKAKGQPREPQVYTLPPCRDELTKNQVSLWCLVK
GFYPSDIAVEWESNGQPENNYKTTPPVLDSDGSFFLYSKLTVDKSRW
QQGNVFSCSVMHEALHNHYTQKSLSLSPG

[0349] In some embodiments, the first half-life extension domain comprises an amino acid sequence having about or at least about 85%, 86%, 87%, 88%, 89%, 90%, 91%, 92%, 93%, 94%, 95%, 96%, 97%, 98%, or 99% sequence identity to any one of the amino acid sequence of any one of SEQ ID NOs: 7, 8, 9 and 10.

[0350] In some embodiments, the second half-life extension domain comprises an amino acid sequence having about or at least about 85%, 86%, 87%, 88%, 89%, 90%, 91%, 92%, 93%, 94%, 95%, 96%, 97%, 98%, or 99% sequence identity to any one of the amino acid sequence of any one of SEQ ID NOs: 7, 11, 12 and 13.

[0351] In some embodiments, the first half-life extension domain comprises an amino acid sequence having one or more modifications, such as one or more amino acid substitutions, additions, or deletions, as compared to the amino acid sequence of any one of SEQ ID NOs: 7, 8, 9 and 10. In some embodiments, the second half-life extension domain comprises an amino acid sequence having one or more modifications, such as one or more amino acid substitutions, additions, or deletions, as compared to the amino acid sequence of any one of SEQ ID NOs: 7, 11, 12 and 13. The one or more modifications can be any modifications or alterations described herein, including, in some embodiments, any modifications or alterations disclosed herein that promote heterodimerization of polypeptide chains and/or suppresses homodimerization of polypeptide chains, alter effector function, or enhance effector function.

[0352] In some embodiments, the Fc domain or fragment thereof comprises one or more amino acid substitutions altering effector function. In some embodiments, the half-life extension domain is an IgG1 Fc domain or fragment thereof and comprises one or more amino acid substitutions selected from the group consisting of N297A, N297G, N297Q, L234A, L235A, C220S, C226S, C229S, P238S, E233P, L234V, L234F, L235E, P331S, S267E, L328F, D265A, and P329G, numbered according to the Kabat EU numbering system. In some embodiments, the half-life extension domain is an IgG2 Fc domain or fragment thereof and comprises the amino substitution(s): V234A and G237A; H268Q, V309L, A330S, and A331S; and/or V234A, G237A, P238S, H268A, V309L, and A330S, numbered according to the Kabat EU numbering system. In some embodiments, the half-life extension domain is an IgG2 Fc domain or fragment thereof and comprises one or more amino acid substitutions selected from the group consisting of V234A, G237A, H268Q, V309L, A330S, A331S, P238S, H268A, and V309L, numbered according to the Kabat EU numbering system. In some embodiments, the half-life extension domain is an IgG4 Fc domain or fragment thereof and comprises the amino substitution(s): L235A, G237A, and E318A; S228P, L234A, and L235A; H268Q, V309L, A330S, and P331S; and/or S228P and L235A, numbered according to the Kabat EU numbering system. In some embodiments, the half-life extension domain is an IgG2 Fc domain or fragment thereof and comprises one or more amino acid substitutions selected from the group consisting of L235A, G237A, E318A, S228P, L234A, H268Q, V309L, A330S, and P331S, numbered according to the Kabat EU numbering system.

[0353] In some embodiments, the half-life extension domain comprises Fc domain or fragment thereof that comprises one or more amino acid substitutions enhancing effector function. In some embodiments, the half-life extension domain is an IgG1 Fc domain or fragment thereof and comprises the amino acid substitution(s): S298A, E333A, and K334A; S239D and I332E; S239D, A330L, and I332E; P247I and A339D or A339Q; D280H and K290S; D280H, K290S, and either S298D or S298V; F243L, R292P, and Y300L; F243L, R292P, Y300L, and P396L; F243L, R292P, Y300L, V305I, and P396L; G236A, S239D, and I332E; K326A and E333A; K326W and E333S; K290E, S298G, and T299A; K290E, S298G, T299A, and K326E; K290N, S298G, and T299A; K290N, S298G, T299A, and K326E; K334V; L235S, S239D, and K334V; K334V and Q331M, S239D, F243V, E294L, or S298T; E233L, Q311M, and K334V; L234I, Q311M, and K334V; K334V and S298T, A330M, or A330F; K334V, Q311M, and either A330M or A330F; K334V, S298T, and either A330M or A330F; K334V, S239D, and either A330M or S298T; L234Y, Y296W, and K290Y, F243V, or E294L; Y296W and either L234Y or K290Y; S239D, A330S, and I332E, V264I; F243L and V264I; L328M; I332E; L328M and I332E; V264I and I332E; S239E and I332E; S239Q and I332E; S239E; A330Y; I332D; L328I and I332E; L328Q and I332E; V264T; V240I; V266I; S239D; S239D and I332D; S239D and I332N; S239D and I332Q; S239E and I332D; S239E and I332N; S239E and I332Q; S239N and I332D; S239N and I332E; S239Q and I332D; A330Y and I332E; V264I, A330Y, and I332E; A330L and I332E; V264I, A330L, and I332E; L234E, L234Y, or L234I; L235D, L235S, L235Y, or L235I; S239T; V240M; V264Y; A330I; N325T; I332E and L328D, L328V, L328T, or L328I; V264I, I332E, and either S239E or S239Q; S239E, V264I, A330Y, and I332E; A330Y, I332E, and either S239D or S239N; A330L, I332E, and either S239D or S239N; V264I, S298A, and I332E; S298A, I332E, and either S239D or S239N; S239D, V264I, and I332E; S239D, V264I, S298A, and I332E; S239D, V264I, A330L, and I332E; S239D, I332E, and A330I; P230A; P230A, E233D, and I332E; E272Y; K274T, K274E, K274R, K274L, or K274Y; F275W; N276L; Y278T; V302I; E318R; S324D, S324I or S324V; K326I or K326T; T335D, T335R, or T335Y; V240I and V266I; S239D, A330Y, I332E, and L234I; S239D, A330Y, I332E, and L235D; S239D, A330Y, I332E, and V240I; S239D, A330Y, I332E, and V264T; and/or S239D, A330Y, I332E, and either K326E or K326T, numbered according to the Kabat EU numbering system. In some embodiments, the half-life extension domain is an IgG1 Fc domain or fragment thereof and comprises one or more amino acid substitution(s) selected from the group consisting of: P230A, E233D, L234E, L234Y, L234I, L235D, L235S, L235Y, L235I, S239D, S239E, S239N, S239Q, S239T, V240I, V240M, F243L, V264I, V264T, V264Y, V266I, E272Y, K274T, K274E, K274R, K274L, K274Y, F275W, N276L, Y278T, V302I, E318R, S324D, S324I, S324V, N325T, K326I, K326T, L328M, L328I, L328Q, L328D, L328V, L328T, A330Y, A330L, A330I, I332D, I332E, I332N, I332Q, T335D, T335R, and T335Y.

[0354] In some embodiments, the half-life extension domain comprises one or more amino acid substitution(s) that enhance binding of the half-life extension domain to FcRn. In some embodiments, the one or more amino acid substitution(s) increase binding affinity of an Fc-containing polypeptide (e.g., a heavy chain polypeptide or an Fc domain or fragment thereof) to FcRn at acidic pH. In some embodiments, the half-life extension domain comprises one or more amino acid substitution(s) selected from the group consisting of M428F; T250Q and M428F; M252Y, S254T, and T256E; P257I and N434H; D376V and N434H; P257I and Q3111; N434A; N434W; M428F and N434S; V259I and V308F; M252Y, S254T, and T256E; V259I, V308F and M428F; T307Q and N434A; T307Q and N434S; T307Q, E380A, and N434A; V308P and N434A; N434H; and V308P.

[0355] For manufacturing purposes, a signal peptide may be engineered upstream of the half life domain to improve secretion of the protein. The signal peptide is selected according to the cell line's requirements as is known in the art. It will be understood that the signal peptide is not expressed as part of the protein that will be purified and formulated as drug product.

[0356] 1.4.1 Heterodimerization Modifications

[0357] The half-life extension domains described herein may include one or more modifications that promote heterodimerization of two different half-life extension domains. In some embodiments, it is desirable to promote heterodimerization of the first and second half-life extension domains such that production of the masked cytokine in its correct heterodimeric form is produced efficiently. As such, one or more amino acid modifications can be made to the first half-life extension domain and one or more amino acid modifications can be made to the second half-life extension domain using any strategy available in the art, including any strategy as described in Klein et al. (2012), MAbs, 4(6): 653-663. Exemplary strategies and modifications are described in detail below.

[0358] Knobs-into-Holes Approach

[0359] One strategy for promoting heterodimerization of two different half-life extension domains is an approach termed the “knobs-into-holes”.

[0360] In some embodiments, the masked cytokine comprises a first half-life extension domain and a second half-life extension domain, each of which comprises a CH3 domain. In some embodiments, the half-life extension domain comprising a CH3 domain is a heavy chain polypeptide or a fragment thereof (e.g., an Fc domain or fragment thereof). The CH3 domains of the two half-life extension domains can be altered by the “knobs-into-holes” technology, which is described in detail with several examples in, e.g., WO 1996/027011; Ridgway, J. B. et al, Protein Eng. (1996) 9(7): 617-621; Merchant, A. M., et al, Nat. Biotechnol. (1998) 16(7): 677-681. See also Klein et al. (2012), MAbs, 4(6): 653-663. Using the knob-into-holes method, the interaction surfaces of the two CH3 domains are altered to increase the heterodimerization of the two half-life extension domains containing the two altered CH3 domains. This occurs by introducing a bulky residue into the CH3 domain of one of the half-life extension domains, which acts as the “knob.” Then, in order to accommodate the bulky residue, a “hole” is formed in the other half-life extension domain that can accommodate the knob. Either of the altered CH3 domains can be the “knob” while the other can be the “hole.” The introduction of a disulfide bridge further stabilizes the heterodimers (Merchant, A. M., et al, Nat. Biotechnol. (1998) 16(7); Atwell, S., et al, J. Mol. Biol. (1997) 270(1): 26-35) as well as increases yield.

[0361] It has been reported that heterodimerization yields above 97% can be achieved by introducing the S354C and T366W mutations in a heavy chain to create the “knob” and by introducing the Y349C, T366S, L368A, and Y407V mutations in a heavy chain to create the “hole” (numbering of the residues according to the Kabat EU numbering system). Carter et al. (2001), J. Immunol. Methods, 248: 7-15; Klein et al. (2012), MAbs, 4(6): 653-663.

[0362] In some embodiments comprising a first half-life extension domain and a second half-life extension domain, the first half-life extension domain comprises a heavy chain polypeptide or portion thereof (e.g., an Fc domain or fragment thereof) that comprises the amino acid mutations S354C and T366W (numbered according to the Kabat EU numbering system), and the second half-life extension domain comprises a heavy chain polypeptide or portion thereof (e.g., an Fc domain or fragment thereof) that comprises the amino acid mutations Y349C, T366S, L368A, and Y407V (numbered according to the Kabat EU numbering system). In some embodiments comprising a first half-life extension domain and a second half-life extension domain, the first half-life extension domain comprises a heavy chain polypeptide or portion thereof (e.g., an Fc domain or fragment thereof) that comprises the amino acid mutations Y349C, T366S, L368A, and Y407V (numbered according to the Kabat EU numbering system), and the second half-life extension domain comprises a heavy chain polypeptide or portion thereof (e.g., an Fc domain or fragment thereof) that comprises the amino acid mutations S354C and T366W (numbered according to the Kabat EU numbering system).

[0363] Additional examples of substitutions that can be made to form knobs and holes include those described in US20140302037A1, the contents of which are herein incorporated by reference. For example, in some embodiments, any of the following amino acid substitutions can be made to a first half-life extension domain (“first domain”) and a paired second half-life extension domain (“second domain”) that each contain an Fc domain: (a) Y407T in the first domain and T366Y in the second domain; (b) Y407A in the first domain and T366W in the second domain; (c) F405A in the first domain and T394W in the second domain; (d) F405W in the first domain and T394S in the second domain; (e) Y407T in the first domain and T366Y in the second domain; (f) T366Y and F405A in the first domain and T394W and Y407T in the second domain; (g) T366W and F405W in the first domain and T394S and Y407A in the second domain; (h) F405W and Y407A in the first domain and T366W and T394S in the second domain; or (i) T366W in the first domain and T366S, L368A, and Y407V in the second domain, numbered according to the Kabat EU numbering system.

[0364] In some embodiments, any of the following amino acid substitutions can be made to a first half-life extension domain (“first domain”) and a paired second half-life extension domain (“second domain”) that each contain an Fc domain: (a) Y407T in the second domain and T366Y in the first domain; (b) Y407A in the second domain and T366W in the first domain; (c) F405A in the second domain and T394W in the first domain; (d) F405W in the second domain and T394S in the first domain; (e) Y407T in the second domain and T366Y in the first domain; (f) T366Y and F405A in the second domain and T394W and Y407T in the first domain; (g) T366W and F405W in the second domain and T394S and Y407A in the first domain; (h) F405W and Y407A in the second domain and T366W and T394S in the first domain; or (i) T366W in the second domain and T366S, L368A, and Y407V in the first domain, numbered according to the Kabat EU numbering system.

[0365] In embodiments comprising a first half-life extension domain and a second half-life extension domain that each comprise an Fc domain, any of the heterodimerizing alterations described herein can be used in the Fc domains to promote heterodimerization of any of the masked cytokines described herein.

[0366] 1.5 Exemplary Masked Cytokines

[0367] Masked cytokines according to the disclosure can combine a IL-2 cytokine or functional fragment thereof as described anywhere herein; a masking moiety as described anywhere herein; first and second half life domains as described anywhere herein; and cleavable and non-cleavable linkers as described anywhere herein.

[0368] Furthermore, in an embodiment, any specific sequence disclosed herein may optionally comprise further amino acid substitutions, such as one, two or three substitutions. In another embodiment, sequences having at least 90% homology, preferably 95%, more preferably 99%, to any specific sequence disclosed herein for a domain of the masked cytokines are also encompassed by the invention.

[0369] In some embodiments, the IL-2 cytokine or functional fragment thereof comprises the amino acid sequence of SEQ ID NO: 3 and the masking moiety comprises the amino acid sequence of SEQ ID NO: 4.

[0370] In some embodiments, the IL-2 cytokine or functional fragment thereof comprises the amino acid sequence of SEQ ID NO: 3 and the masking moiety comprises the amino acid sequence of SEQ ID NO: 5.

[0371] In some embodiments, the IL-2 cytokine or functional fragment thereof comprises the amino acid sequence of SEQ ID NO: 3 and the first half-life extension domain comprises SEQ ID NO: 9 (Y349C; T366S; L38A; Y407V; and N297A) and the second half-life extension domain comprises SEQ ID NO 12 (S354C, T366W and N297A).

[0372] In some embodiments, the IL-2 cytokine or functional fragment thereof comprises the amino acid sequence of SEQ ID NO: 3 and the first half-life extension domain comprises SEQ ID NO: 10 (Y349C; T366S; L38A; Y407V, N297A and I253A) and the second half-life extension domain comprises SEQ ID NO: 13 (S354C, T366W, N297A and I253A).

[0373] In some embodiments, the IL-2 cytokine or functional fragment thereof comprises the amino acid sequence of SEQ ID NO: 3 and the non-cleavable linker comprises an amino acid sequence as shown in SEQ ID NO: 14.

[0374] In some embodiments, the masking moiety comprises the amino acid sequence of SEQ ID NO: 4 and the first half-life extension domain comprises SEQ ID NO: 9 (Y349C; T366S; L38A; Y407V; and N297A) and the second half-life extension domain comprises SEQ ID NO 12 (S354C, T366W and N297A).

[0375] In some embodiments, the masking moiety comprises the amino acid sequence of SEQ ID NO: 5 and the first half-life extension domain comprises SEQ ID NO: 9 (Y349C; T366S; L38A; Y407V; and N297A) and the second half-life extension domain comprises SEQ ID NO 12 (S354C, T366W and N297A).

[0376] In some embodiments, the masking moiety comprises the amino acid sequence of SEQ ID NO: 4 and the first half-life extension domain comprises SEQ ID NO: 10 (Y349C; T366S; L38A; Y407V, N297A and I253A) and the second half-life extension domain comprises SEQ ID NO: 13 (S354C, T366W, N297A and I253A).

[0377] In some embodiments, the masking moiety comprises the amino acid sequence of SEQ ID NO: 5 and the first half-life extension domain comprises SEQ ID NO: 10 (Y349C; T366S; L38A; Y407V, N297A and I253A) and the second half-life extension domain comprises SEQ ID NO: 13 (S354C, T366W, N297A and I253A).

[0378] In some embodiments, the masking moiety comprises the amino acid sequence of SEQ ID NO: 4 and the non-cleavable linker comprises an amino acid sequence as shown in SEQ ID NO: 14.

[0379] In some embodiments, the masking moiety comprises the amino acid sequence of SEQ ID NO: 5 and the non-cleavable linker comprises an amino acid sequence as shown in SEQ ID NO: 14.

[0380] In some embodiments, the first half-life extension domain comprises SEQ ID NO: 9 (Y349C; T366S; L38A; Y407V; and N297A) and the second half-life extension domain comprises SEQ ID NO 12 (S354C, T366W and N297A) and the non-cleavable linker comprises an amino acid sequence as shown in SEQ ID NO: 14.

[0381] In some embodiments, the first half-life extension domain comprises SEQ ID NO: 9 (Y349C; T366S; L38A; Y407V; and N297A) and the second half-life extension domain comprises SEQ ID NO 12 (S354C, T366W and N297A) and the non-cleavable linker comprises an amino acid sequence as shown in SEQ ID NO: 14.

[0382] In some embodiments, the IL-2 cytokine or functional fragment thereof comprises the amino acid sequence of SEQ ID NO: 3 and the masking moiety comprises the amino acid sequence of SEQ ID NO: 4 and the first half-life extension domain comprises SEQ ID NO: 9 (Y349C; T366S; L38A; Y407V; and N297A) and the second half-life extension domain comprises SEQ ID NO 12 (S354C, T366W and N297A).

[0383] In some embodiments, the IL-2 cytokine or functional fragment thereof comprises the amino acid sequence of SEQ ID NO: 3 and the masking moiety comprises the amino acid sequence of SEQ ID NO: 5 and the first half-life extension domain comprises SEQ ID NO: 9 (Y349C; T366S; L38A; Y407V; and N297A) and the second half-life extension domain comprises SEQ ID NO 12 (S354C, T366W and N297A).

[0384] In some embodiments, the IL-2 cytokine or functional fragment thereof comprises the amino acid sequence of SEQ ID NO: 3 and the masking moiety comprises the amino acid sequence of SEQ ID NO: 4 and the first half-life extension domain comprises SEQ ID NO: 10 (Y349C; T366S; L38A; Y407V, N297A and I253A) and the second half-life extension domain comprises SEQ ID NO: 13 (S354C, T366W, N297A and I253A)

[0385] In some embodiments, the IL-2 cytokine or functional fragment thereof comprises the amino acid sequence of SEQ ID NO: 3 and the masking moiety comprises the amino acid sequence of SEQ ID NO: 5 and the first half-life extension domain comprises SEQ ID NO: 10 (Y349C; T366S; L38A; Y407V, N297A and I253A) and the second half-life extension domain comprises SEQ ID NO: 13 (S354C, T366W, N297A and I253A).

[0386] In some embodiments, the IL-2 cytokine or functional fragment thereof comprises the amino acid sequence of SEQ ID NO: 3 and the masking moiety comprises the amino acid sequence of SEQ ID NO: 4 and the non-cleavable linker comprises an amino acid sequence as shown in SEQ ID NO: 14.

[0387] In some embodiments, the IL-2 cytokine or functional fragment thereof comprises the amino acid sequence of SEQ ID NO: 3 and the masking moiety comprises the amino acid sequence of SEQ ID NO: 5 and the non-cleavable linker comprises an amino acid sequence as shown in SEQ ID NO: 14.

[0388] In some embodiments, the masking moiety comprises the amino acid sequence of SEQ ID NO: 4 and the first half-life extension domain comprises SEQ ID NO: 9 (Y349C; T366S; L38A; Y407V; and N297A) and the second half-life extension domain comprises SEQ ID NO 12 (S354C, T366W and N297A) and the non-cleavable linker comprises an amino acid sequence as shown in SEQ ID NO: 14.

[0389] In some embodiments, the masking moiety comprises the amino acid sequence of SEQ ID NO: 5 and the first half-life extension domain comprises SEQ ID NO: 9 (Y349C; T366S; L38A; Y407V; and N297A) and the second half-life extension domain comprises SEQ ID NO 12 (S354C, T366W and N297A) and the non-cleavable linker comprises an amino acid sequence as shown in SEQ ID NO: 14.

[0390] In some embodiments, the masking moiety comprises the amino acid sequence of SEQ ID NO: 4 and the first half-life extension domain comprises SEQ ID NO: 10 (Y349C; T366S; L38A; Y407V, N297A and I253A) and the second half-life extension domain comprises SEQ ID NO: 13 (S354C, T366W, N297A and I253A) and the non-cleavable linker comprises an amino acid sequence as shown in SEQ ID NO: 14.

[0391] In some embodiments, the masking moiety comprises the amino acid sequence of SEQ ID NO: 5 and the first half-life extension domain comprises SEQ ID NO: 10 (Y349C; T366S; L38A; Y407V, N297A and I253A) and the second half-life extension domain comprises SEQ ID NO: 13 (S354C, T366W, N297A and I253A) and the non-cleavable linker comprises an amino acid sequence as shown in SEQ ID NO: 14.

[0392] In some embodiments, the IL-2 cytokine or functional fragment thereof comprises the amino acid sequence of SEQ ID NO: 3 and the masking moiety comprises the amino acid sequence of SEQ ID NO: 4 and the first half-life extension domain comprises SEQ ID NO: 9 (Y349C; T366S; L38A; Y407V; and N297A) and the second half-life extension domain comprises SEQ ID NO 12 (S354C, T366W and N297A) and the non-cleavable linker comprises an amino acid sequence as shown in SEQ ID NO: 14.

[0393] In some embodiments, the IL-2 cytokine or functional fragment thereof comprises the amino acid sequence of SEQ ID NO: 3 and the masking moiety comprises the amino acid sequence of SEQ ID NO: 5 and the first half-life extension domain comprises SEQ ID NO: 9 (Y349C; T366S; L38A; Y407V; and N297A) and the second half-life extension domain comprises SEQ ID NO 12 (S354C, T366W and N297A) and the non-cleavable linker comprises an amino acid sequence as shown in SEQ ID NO: 14.

[0394] In some embodiments, the IL-2 cytokine or functional fragment thereof comprises the amino acid sequence of SEQ ID NO: 3 and the masking moiety comprises the amino acid sequence of SEQ ID NO: 4 and the first half-life extension domain comprises SEQ ID NO: 10 (Y349C; T366S; L38A; Y407V, N297A and I253A) and the second half-life extension domain comprises SEQ ID NO: 13 (S354C, T366W, N297A and I253A) and the non-cleavable linker comprises an amino acid sequence as shown in SEQ ID NO: 14.

[0395] In some embodiments, the IL-2 cytokine or functional fragment thereof comprises the amino acid sequence of SEQ ID NO: 3 and the masking moiety comprises the amino acid sequence of SEQ ID NO: 5 and the first half-life extension domain comprises SEQ ID NO: 10 (Y349C; T366S; L38A; Y407V, N297A and I253A) and the second half-life extension domain comprises SEQ ID NO: 13 (S354C, T366W, N297A and I253A) and the non-cleavable linker comprises an amino acid sequence as shown in SEQ ID NO: 14.

[0396] In some embodiments, the IL-2 cytokine or functional fragment thereof comprises the amino acid sequence of SEQ ID NO: 3 and the masking moiety comprises the amino acid sequence of SEQ ID NO: 4 and the first half-life extension domain comprises SEQ ID NO: 9 (Y349C; T366S; L38A; Y407V; and N297A) and the second half-life extension domain comprises SEQ ID NO 12 (S354C, T366W and N297A) and the non-cleavable linker comprises an amino acid sequence as shown in SEQ ID NO: 23.

### 2. CLEAVAGE PRODUCT

[0397] Provided herein is a cleavage product of a ‘heterodimeric’ masked IL-2 cytokines described herein.

[0398] The masked IL-2 cytokines described herein comprise a cleavable linker. Upon proteolytic cleavage of the cleavable linker at the cleavage site, a cleavage product comprising the IL-2 cytokine or functional fragment thereof is formed. The IL-2 cytokine or functional fragment thereof in the cleavage product is activated since it is no longer masked by the masking moiety. The IL-2 cytokine or functional fragment thereof in the cleavage product is therefore capable of binding to the target protein.

[0399] The tumor cell environment is complex and can comprise multiple different proteases. As such, the precise site at which a given cleavable peptide within a masked IL-2 cytokine will be cleaved in the tumor cell environment may vary between tumor types, between patients with the same tumor type and even between cleavage products formed in the same tumor. Moreover, even after cleavage, further modification of the initial cleavage product, e.g. by removal of one or two terminal amino acids, may occur by the further action of proteases in the tumor cell environment. A distribution of cleavage products can thus be expected to form in the tumor cell environment of a patient following administration of a masked cytokine as described herein.

[0400] Provided herein is a cleavage product capable of binding to IL-2R, the cleavage product comprising an IL-2 cytokine or functional fragment thereof, preparable by proteolytic cleavage of the cleavable peptide in a masked IL-2 cytokine as described anywhere herein.

[0401] Also provided herein is a cleavage product of a masked IL-2 cytokine, where the cleavage product is capable of binding to IL-2R, the cleavage product comprising an IL-2 cytokine or functional fragment thereof as defined anywhere herein. Also provided herein is a distribution of cleavage products obtained or obtainable from a single structure of a masked IL-2 cytokine, where each cleavage product within the distribution of cleavage products (i) is capable of binding to IL-2R and (ii) comprises an IL-2 cytokine or functional fragment thereof as defined anywhere herein.

[0402] Also provided herein is a cleavage product of a masked IL-2 cytokine, where the cleavage product is capable of binding to IL-2R, the cleavage product comprising a polypeptide comprising formula 3:

PCP-SD-C (3)

[0403] wherein PCP is a portion of a proteolytically cleavable peptide; SD is a spacer domain; and C is an IL-2 cytokine or functional fragment thereof.

[0404] In some embodiments, the cleavage product has an amino acid sequence with at least 90% homology to the mature IL-2 of SEQ ID NO: 2.

[0405] Further provided herein is a cleavage product of a masked IL-2 cytokine, where the cleavage product is capable of binding to IL-2R, the cleavage product comprising a protein heterodimer comprising:
[0406] a) a first polypeptide chain comprising a first half-life extension domain; and
[0407] b) a second polypeptide chain comprising a polypeptide comprising formula 5:

HL2-L2-C (5)

[0408] wherein HL2 is a second half-life extension domain; L2 is a non-cleavable linker; and C is an IL-2 cytokine or functional fragment thereof; and wherein the first half-life extension domain is associated with the second half-life extension domain. Also provided herein is a distribution of cleavage products obtained or obtainable from a single structure of a masked IL-2 cytokine, where each cleavage product within the distribution of cleavage products (i) is capable of binding to IL-2R and (ii) comprises a protein heterodimer comprising:

[0409] a) a first polypeptide chain comprising a first half-life extension domain; and

[0410] b) a second polypeptide chain comprising a polypeptide comprising formula 5:

HL2-L2-C (5)

[0411] wherein HL2 is a second half-life extension domain; L2 is a non-cleavable linker; and C is an IL-2 cytokine or functional fragment thereof; and wherein the first half-life extension domain is associated with the second half-life extension domain.

[0412] Further provided herein is a cleavage product of a masked IL-2 cytokine, where the cleavage product is capable of binding to IL-2R, the cleavage product comprising a protein heterodimer comprising:
[0413] a) a first polypeptide chain comprising a polypeptide comprising formula 4:

HL1-SD-PCP (4)

[0414] wherein HL1 is a first half-life extension domain; SD is a spacer domain; and PCP is a portion of a proteolytically cleavable peptide; and
[0415] b) a second polypeptide chain comprising a polypeptide comprising formula 5:

HL2-L2-C (5)

[0416] wherein HL2 is a second half-life extension domain; L2 is a non-cleavable linker; and C is an IL-2 cytokine or functional fragment thereof; and

[0417] wherein the first half-life extension domain is associated with the second half-life extension domain.

[0418] Within the cleavage product, the masking moiety, half-life extension domains, IL-2 cytokine or functional fragment thereof, linkers, space domains and type of association between the first half-life extension domain and the second half-life extension domain may be any one of those described herein, and any combination of those described herein.

[0419] The location of the cleavable peptide determines the structure of the resulting cleavage product comprising the IL-2 cytokine.

[0420] A “portion of a proteolytically cleavable peptide”, refers to a part of the original proteolytically cleavable peptide sequence after cleavage at the cleavage site has occurred. After cleavage, further modification of the initial cleavage product, e.g. by removal of one or two terminal amino acids, may also occur by the further action of proteases in the tumor cell environment. As such, cleavage products within the distribution of cleavage products that might be formed in the tumor cell environment of a patient following administration of a masked cytokine might not contain any portion of the proteolytically cleavable peptide.

[0421] In some embodiments, a “portion” refers to 1 amino acid, 2 amino acids, 3 amino acids, 4 amino acids, 5 amino acids or 6 amino acids of the original proteolytically cleavable peptide sequence. In some embodiments, a “portion” refers to 2 amino acids of the original proteolytically cleavable peptide sequence.

[0422] In some embodiments, a “portion” refers to 3 amino acids of the original proteolytically cleavable peptide sequence. In some embodiments, a “portion” refers to 4 amino acids of the original proteolytically cleavable peptide sequence.

[0423] In some embodiments, the ‘portion’ of the proteolytically cleavable peptide is from 3 to 6 amino acids in length. In some embodiments, the ‘portion’ of the proteolytically cleavable peptide is 3 or 4 amino acids in length.

[0424] Cleavage sites for cleavable linkers disclosed herein are disclosed below:

| | Sequence |
|---|---|
| | (* indicates a cleavage site |
| SEQ ID NO: | within the cleavable peptide) |
| 24 | MPYD*LYHP |
| 25 | DSGG*FMLT |
| 26 | HEQ*LTV |
| 27 | RAAA*VKSP |
| 28 | VPLS*LY |
| 118 | DLLA*VVAAS |
| 119 | ISSGLL*SG*RS |

[0425] Purely by way of example, in the above table, * indicates a known or observed protease cleavage site within the cleavable peptide.

[0426] Accordingly, herein disclosed is the cleavage product of any one of the masked cytokines disclosed herein.

[0427] In some embodiments, the cleavage product comprises an amino acid sequence having about or at least about 85%, 86%, 87%, 88%, 89%, 90%, 91%, 92%, 93%, 94%, 95%, 96%, 97%, 98%, or 99% sequence identity to an amino acid sequence selected from the group consisting of SEQ ID NOs: 52, 53, 54, 55 and 56. In some embodiments, the cleavage product comprises an amino acid sequence having about or at least about 85%, 86%, 87%, 88%, 89%, 90%, 91%, 92%, 93%, 94%, 95%, 96%, 97%, 98%, or 99% sequence identity to an amino acid sequence selected from the group consisting of SEQ ID NOs: 52, 53, 54, 55, 56 and 137. In some embodiments, the cleavage product comprises an amino acid sequence having about or at least about 85%, 86%, 87%, 88%, 89%, 90%, 91%, 92%, 93%, 94%, 95%, 96%, 97%, 98%, or 99% sequence identity to an amino acid sequence of SEQ ID NO: 52. In some embodiments, the cleavage product comprises an amino acid sequence having about or at least about 85%, 86%, 87%, 88%, 89%, 90%, 91%, 92%, 93%, 94%, 95%, 96%, 97%, 98%, or 99% sequence identity to an amino acid sequence of SEQ ID NO: 53. In some embodiments, the cleavage product comprises an amino acid sequence having about or at least about 85%, 86%, 87%, 88%, 89%, 90%, 91%, 92%, 93%, 94%, 95%, 96%, 97%, 98%, or 99% sequence identity to an amino acid sequence of SEQ ID NO: 54. In some embodiments, the cleavage product comprises an amino acid sequence having about or at least about 85%, 86%, 87%, 88%, 89%, 90%, 91%, 92%, 93%, 94%, 95%, 96%, 97%, 98%, or 99% sequence identity to an amino acid sequence of SEQ ID NO: 55. In some embodiments, the cleavage product comprises an amino acid sequence having about or at least about 85%, 86%, 87%, 88%, 89%, 90%, 91%, 92%, 93%, 94%, 95%, 96%, 97%, 98%, or 99% sequence identity to an amino acid sequence of SEQ ID NO: 56. In some embodiments, the cleavage product comprises an amino acid sequence having about or at least about 85%, 86%, 87%, 88%, 89%, 90%, 91%, 92%, 93%, 94%, 95%, 96%, 97%, 98%, or 99% sequence identity to an amino acid sequence of SEQ ID NO: 137.

[0428] In some embodiments, the cleavage product has an amino acid sequence selected from the group consisting of SEQ ID NOs: 52, 53, 54, 55 and 56. In some embodiments, the cleavage product has an amino acid sequence selected from the group consisting of SEQ ID NOs: 52, 53, 54, 55, 56 and 137. In some embodiments, the cleavage product has an amino acid sequence of SEQ ID NO: 52. In some embodiments, the cleavage product has an amino acid sequence of SEQ ID NO: 53. In some embodiments, the cleavage product has an amino acid sequence of SEQ ID NO: 54. In some embodiments, the cleavage product has an amino acid sequence of SEQ ID NO: 55. In some embodiments, the cleavage product has an amino acid sequence of SEQ ID NO: 56. In some embodiments, the cleavage product has an amino acid sequence of SEQ ID NO: 137.

[0429] % homology of the amino acid sequence of these cleavage products to mature IL-2 of SEQ ID NO: 2 is shown in table 1 below:

TABLE 1

| | % Homology to mature |
|---|---|
| Description | IL-2 SEQ ID NO :2 |
| AK168 Cleavage Product | 91.4 |
| (“AK168CP”) | |
| AK191 Cleavage Product 1 | 91.4 |
| (“AK191CP”) | |
| AK197 Cleavage Product | 92.1 |
| (“AK197CP”) | |
| AK203 Cleavage Product 3 | 91.4 |
| (“AK203CP”) | |
| AK209 Cleavage Product | 92.8 |
| (“AK209CP) | |
| mature IL-2 (SEQ ID NO: 2) | 100 |

[0430] In some embodiments, the cleavage product comprises a first polypeptide chain having an amino acid sequence having about or at least about 85%, 86%, 87%, 88%, 89%, 90%, 91%, 92%, 93%, 94%, 95%, 96%, 97%, 98%, or 99% sequence identity to an amino acid sequence of SEQ ID NO: 136 and a second polypeptide chain having an amino acid sequence having about or at least about 85%, 86%, 87%, 88%, 89%, 90%, 91%, 92%, 93%, 94%, 95%, 96%, 97%, 98%, or 99% sequence identity to an amino acid sequence of SEQ ID NO: 135. In some embodiments, the cleavage product comprises a first polypeptide chain having an amino acid sequence having about or at least about 85%, 86%, 87%, 88%, 89%, 90%, 91%, 92%, 93%, 94%, 95%, 96%, 97%, 98%, or 99% sequence identity to an amino acid sequence of SEQ ID NO: 139 and a second polypeptide chain having an amino acid sequence having about or at least about 85%, 86%, 87%, 88%, 89%, 90%, 91%, 92%, 93%, 94%, 95%, 96%, 97%, 98%, or 99% sequence identity to an amino acid sequence of SEQ ID NO: 138. In some embodiments, the cleavage product comprises a first polypeptide chain having an amino acid sequence having about or at least about 85%, 86%, 87%, 88%, 89%, 90%, 91%, 92%, 93%, 94%, 95%, 96%, 97%, 98%, or 99% sequence identity to an amino acid sequence of SEQ ID NO: 141 and a second polypeptide chain having an amino acid sequence having about or at least about 85%, 86%, 87%, 88%, 89%, 90%, 91%, 92%, 93%, 94%, 95%, 96%, 97%, 98%, or 99% sequence identity to an amino acid sequence of SEQ ID NO: 140. In some embodiments, the cleavage product comprises a first polypeptide chain having an amino acid sequence having about or at least about 85%, 86%, 87%, 88%, 89%, 90%, 91%, 92%, 93%, 94%, 95%, 96%, 97%, 98%, or 99% sequence identity to an amino acid sequence of SEQ ID NO: 143 and a second polypeptide chain having an amino acid sequence having about or at least about 85%, 86%, 87%, 88%, 89%, 90%, 91%, 92%, 93%, 94%, 95%, 96%, 97%, 98%, or 99% sequence identity to an amino acid sequence of SEQ ID NO: 142.

[0431] In some embodiments, the cleavage product has a first polypeptide chain having an amino acid sequence of SEQ ID NO: 136 and a second polypeptide chain having an amino acid sequence of SEQ ID NO: 135. In some embodiments, the cleavage product has a first polypeptide chain having an amino acid sequence of SEQ ID NO: 139 and a second polypeptide chain having an amino acid sequence of SEQ ID NO: 138. In some embodiments, the cleavage product has a first polypeptide chain having an amino acid sequence of SEQ ID NO: 141 and a second polypeptide chain having an amino acid sequence of SEQ ID NO: 140. In some embodiments, the cleavage product has a first polypeptide chain having an amino acid sequence of SEQ ID NO: 143 and a second polypeptide chain having an amino acid sequence of SEQ ID NO: 142.

### 3. BINDING ASSAYS

[0432] The strength, or affinity of immunological binding interactions, such as between a cytokine or functional fragment thereof and a binding partner (e.g., a target protein, such as a cytokine receptor) for which the cytokine or functional fragment thereof is specific, can be expressed in terms of the dissociation constant (Kd) of the interaction, wherein a smaller Kd represents a greater affinity. The binding of the IL-2 cytokine to the IL-2 cytokine receptor (e.g., IL-2R or a component thereof, such as IL-2Rα, IL-2Rβ, IL-2Rγ, or combinations thereof), can be expressed in terms of the Kd. In some embodiments, the immunological binding interactions are between a masked cytokine (in the presence or absence of a protease) and a target protein, such as a cytokine receptor. In the context of IL-2 cytokine binding, the target protein could be IL-2R (comprising the IL-2Rα, IL-2Rβ, and IL-2Rγ chains), the IL-2Rα chain, the IL-2Rβ chain, or the IL-2Rα/β dimeric complex. Immunological binding properties of proteins can be quantified using methods well known in the art. For example, one method comprises measuring the rates of cytokine receptor (e.g., IL-2R)/cytokine (e.g., IL-2) complex formation and dissociation, wherein those rates depend on the concentrations of the complex partners, the affinity of the interaction, and geometric parameters that equally influence the rate in both directions. Both the “on rate constant” (Kon) and the “off rate constant” (Koff) can be determined by calculation of the concentrations and the actual rates of association and dissociation. The ratio of Koff/Kon enables the cancelation of all parameters not related to affinity, and is equal to the dissociation constant Kd. See Davies et al., Annual Rev Biochem. 59:439-473, (1990).

[0433] In some aspects, a masked cytokine described herein binds to a target protein with about the same or higher affinity upon cleavage with a protease as compared to the parental cytokine that comprises a masking moiety but does not comprise a cleavable peptide. The target protein can be any cytokine receptor. In some embodiments, the target protein is IL-2R (comprising the IL-2Rα, IL-2Rβ, and IL-2Rγ chains). In some embodiments, the target protein is IL-2Rα. In some embodiments, the target protein is IL-2Rβ. In some embodiments, the target protein is the IL-2Rα/β dimeric complex.

[0434] In some embodiments, a masked cytokine provided herein that does not comprise a cleavable peptide in the linker has a dissociation constant (Kd) of ≤1M, ≤150 nM, ≤100 nM, ≤50 nM, ≤10 nM, ≤1 nM, ≤0.1 nM, ≤0.01 nM, or ≤0.001 nM (e.g. 10-8 M or less, e.g. from 10-8 M to 10-13 M, e.g., from 10-9 M to 10-13 M) with the target protein. In some embodiments, a masked cytokine provided herein that comprises a cleavable peptide in the linker has a dissociation constant (Kd) of ≤1M, ≤150 nM, ≤100 nM, ≤50 nM, ≤10 nM, ≤1 nM, ≤0.1 nM, ≤0.01 nM, or 0.001 nM (e.g. 10-8 M or less, e.g. from 10-8 M to 10-13 M, e.g., from 10-9 M to 10-13 M) with the target protein prior to cleavable with a protease. In some embodiments, a masked cytokine provided herein that comprises a cleavable peptide in the linker has a dissociation constant (Kd) of ≤1M, ≤150 nM, ≤100 nM, ≤50 nM, ≤10 nM, ≤1 nM, ≤0.1 nM, ≤0.01 nM, or ≤0.001 nM (e.g. 10-8 M or less, e.g. from 10-8 M to 10-13 M, e.g., from 10-9 M to 10-13 M) with the target protein upon cleavage with a protease. In some embodiments, the cytokine or functional fragment thereof of a masked cytokine provided herein has a dissociation constant (Kd) of ≥500M, ≥250M, ≥200M, ≥150M, ≥100M, ≥50M, ≥10M, ≥1M, ≥500 nM, ≥250 nM, ≥150 nM, ≥100 nM, ≥50 nM, ≥10 nM, ≥1 nM, ≥0.1 nM, ≥0.01 nM, or ≥0.001 nM with the masking moiety of the masked cytokine. In some embodiments, the cytokine or functional fragment thereof of a masked cytokine provided herein has a dissociation constant (Kd) that is between about 200M and about 50 nM, such as about or at least about 175M, about or at least about 150M, about or at least about 125M, about or at least about 100M, about or at least about 75M, about or at least about 50M, about or at least about 25M, about or at least about 5M, about or at least about 1M, about or at least about 750 nM, about or at least about 500 nM, about or at least about 250 nM, about or at least about 150 nM, about or at least about 100 nM, about or at least about 75 nM, or about or at least about 50 nM. Assays for assessing binding affinity are well known in the art.

[0435] In some aspects, masked cytokines that exhibit a desired occlusion ratio are provided. The term “occlusion ratio” as used herein refers a ratio of (a) a maximum detected level of a parameter under a first set of conditions to (b) a minimum detected value of that parameter under a second set of conditions. In the context of a masked IL-2 polypeptide, the occlusion ratio refers to the ratio of (a) a maximum detected level of target protein (e.g., IL-2R protein) binding to the masked IL-2 polypeptide in the presence of at least one protease capable of cleaving the cleavable peptide of the masked IL-2 polypeptide to (b) a minimum detected level of target protein (e.g., IL-2R protein) binding to the masked IL-2 polypeptide in the absence of the protease. Thus, the occlusion ratio for a masked cytokine can be calculated by dividing the EC50 of the masked cytokine pre-cleavage by the EC50 of the masked cytokine post-cleavage. The occlusion ratio of a masked cytokine can also be calculated as the ratio of the dissociation constant of the masked cytokine before cleavage with a protease to the dissociation constant of the masked cytokine after cleavage with a protease. In some embodiments, a greater occlusion ratio for the masked cytokine indicates that target protein bound by the masked cytokine occurs to a greater extent (e.g., predominantly occurs) in the presence of a protease capable of cleaving the cleavable peptide of the masked cytokine than in the absence of a protease.

[0436] In some embodiments, masked cytokines with an optimal occlusion ratio are provided herein. In some embodiments, an optimal occlusion ratio of a masked cytokine indicates the masked cytokine has desirable properties useful for the methods or compositions contemplated herein. In some embodiments, a masked cytokine provided herein exhibits an optimal occlusion ratio of about 2 to about 10,000, e.g., about 80 to about 100. In a further embodiment of any of the masked cytokine provided herein, the occlusion ratio is about 2 to about 7,500, about 2 to about 5,000, about 2 to about 2,500, about 2 to about 2,000, about 2 to about 1,000, about 2 to about 900, about 2 to about 800, about 2 to about 700, about 2 to about 600, about 2 to about 500, about 2 to about 400, about 2 to about 300, about 2 to about 200, about 2 to about 100, about 2 to about 50, about 2 to about 25, about 2 to about 15, about 2 to about 10, about 5 to about 10, about 5 to about 15, about 5 to about 20, about 10 to about 100, about 20 to about 100, about 30 to about 100, about 40 to about 100, about 50 to about 100, about 60 to about 100, about 70 to about 100, about 80 to about 100, or about 100 to about 1,000. In some embodiments, a masked cytokine provided herein exhibits an optimal occlusion ratio of about 2 to about 1,000. Binding of a masked IL-2 polypeptide to a target protein before cleavage and/or after cleavage with a protease can be determined using techniques well known in the art such as by ELISA.

[0437] In some embodiments, a masking moiety described herein binds to a cytokine or functional fragment thereof as described herein with lower affinity than the affinity between the cytokine or functional fragment thereof and a target protein (e.g., cytokine receptor). In certain embodiments, a masking moiety provided herein binds to a cytokine or functional fragment thereof as described herein with a dissociation constant (Kd) of ≥500M, ≥250M, ≥200M, ≥150M, ≥100M, ≥50M, ≥10M, ≥1M, ≥500 nM, ≥250 nM, ≥150 nM, ≥100 nM, ≥50 nM, ≥10 nM, ≥1 nM, ≥0.1 nM, ≥0.01 nM, or ≥0.001 nM.

### 4. MASKED CYTOKINES WITH VARIANT MASKING MOIETIES

[0438] Provided herein, are masked cytokines with variant masking moieties.

[0439] In some embodiments, the masked IL-2 cytokine comprises a masking moiety and an IL-2 cytokine or functional fragment thereof, wherein the masking moiety masks the IL-2 cytokine or functional fragment thereof thereby reducing or preventing binding of the IL-cytokine or functional fragment thereof to its cognate receptor, and wherein a proteolytically cleavable peptide is present between the IL-2 fragment or functional fragment thereof and masking moiety.

[0440] An IL-2Rβ polypeptide, or a functional fragment thereof, is provided herein, where the IL-2Rβ polypeptide has an amino acid substitution at position C122.

[0441] An IL-2Rβ polypeptide, or a functional fragment thereof, is provided herein, where the IL-2Rβ polypeptide has amino acid substitution C122S.

[0442] An IL-2Rβ polypeptide, or a functional fragment thereof, is provided herein, where the IL-2Rβ polypeptide has an amino acid substitution at position C122 as compared to IL-2Rβ of SEQ ID NO: 4.

[0443] An IL-2Rβ polypeptide, or a functional fragment thereof, is provided herein, where the IL-2Rβ polypeptide has amino acid substitution C122S as compared to IL-2Rβ of SEQ ID NO: 4.

[0444] An IL-2Rβ polypeptide is provided herein, comprising the amino acid sequence of SEQ ID NO: 4 with a C122 mutation.

[0445] An IL-2Rβ polypeptide is provided herein, comprising the amino acid sequence of SEQ ID NO: 11 with a C122S mutation.

[0446] An IL-2Rβ polypeptide, or a functional fragment thereof, is provided herein, where the IL-2Rβ polypeptide has an amino acid substitution at position C168.

[0447] An IL-2Rβ polypeptide, or a functional fragment thereof, is provided herein, where the IL-2Rβ polypeptide has amino acid substitution C168S.

[0448] An IL-2Rβ polypeptide, or a functional fragment thereof, is provided herein, where the IL-2Rβ polypeptide has an amino acid substitution at position C168 as compared to IL-2Rβ of SEQ ID NO: 4.

[0449] An IL-2Rβ polypeptide, or a functional fragment thereof, is provided herein, where the IL-2Rβ polypeptide has amino acid substitution C168S as compared to IL-2Rβ of SEQ ID NO: 4.

[0450] An IL-2Rβ polypeptide is provided herein, comprising the amino acid sequence of SEQ ID NO: 4 with a C168 mutation.

[0451] An IL-2Rβ polypeptide is provided herein, comprising the amino acid sequence of SEQ ID NO: 4 with a C68S mutation.

[0452] An IL-2Rβ polypeptide, or a functional fragment thereof, is provided herein, where the IL-2Rβ polypeptide has amino acid substitutions at positions C122 and C168.

[0453] An IL-2Rβ polypeptide, or a functional fragment thereof, is provided herein, where the IL-2Rβ polypeptide has amino acid substitutions C122S and C168S.

[0454] An IL-2Rβ polypeptide, or a functional fragment thereof, is provided herein, where the IL-2Rβ polypeptide has amino acid substitutions at positions C122 and C168 as compared to IL-2Rβ of SEQ ID NO: 4.

[0455] An IL-2Rβ polypeptide, or a functional fragment thereof, is provided herein, where the IL-2Rβ polypeptide has amino acid substitutions C122S and C168S as compared to IL-2Rβ of SEQ ID NO: 4.

[0456] An IL-2Rβ polypeptide, or a functional fragment thereof, is provided herein, where the IL-2Rβ polypeptide comprises an amino acid of SEQ ID NO: 5.

[0457] A masked cytokine comprising a masking moiety and an IL-2 cytokine or functional fragment thereof, is provided herein, wherein the masking moiety masks the IL-2 cytokine or functional fragment thereof thereby reducing or preventing binding of the IL-2 cytokine or functional fragment thereof to its cognate receptor, and where a proteolytically cleavable peptide is present between the IL-2 cytokine or functional fragment thereof and the masking moiety, and the masking moiety is an IL-2Rβ polypeptide, or a functional fragment thereof, as defined anywhere herein.

[0458] 4.1 ‘Heterodimeric’ Masked Cytokines

[0459] In some embodiments, the masked IL-2 cytokine comprises a masking moiety in a first polypeptide chain and an IL-2 cytokine or functional fragment thereof in a second polypeptide chain. In some embodiments, the masked IL-2 cytokine is as described anywhere herein. In some embodiments, the masked IL-2 cytokine comprises formulae 6 (first polypeptide chain) and 5 (second polypeptide chain) below:

N′HL1-L1-MM C′ (6)

N′HL2-L2-C C′ (5)

[0460] where HL1 is the first half life extension domain, L1 is the first linker, MM is the masking moiety, HL2 is the second half life extension domain, L2 is the second linker, and C is the IL-2 cytokine or functional fragment thereof, wherein at least the first linker or the second linker comprises a proteolytically cleavable peptide. In some embodiments, the first half life extension domain, first linker, masking moiety, second half life extension domain, second linker, and IL-2 cytokine or functional fragment thereof are as described anywhere herein.

[0461] Cleavable peptides having an amino acid sequence as shown in SEQ ID NOs: 118 or 119 have been found to demonstrate very specific cleavage in the tumor cell environment compared to non-tumor cell environment. These cleavable peptides may therefore be used advantageously in combination with the variant masking moieties disclosed herein.

[0462] 4.2 ‘Linear’ Masked Cytokines

[0463] In some embodiments, the masked IL-2 cytokine comprises a masking moiety and an IL-2 cytokine or functional fragment thereof linked in a single polypeptide chain. In some embodiments, the masked IL-2 cytokine comprises a polypeptide chain comprising formula 1:

N′HL-L2-C-L1-MM C′ (1)

[0464] where HL is the half life extension domain, L1 is the first linker, MM is the masking moiety, L2 is the second linker, and C is the IL-2 cytokine or functional fragment thereof, wherein at least the first linker comprises a proteolytically cleavable peptide.

[0465] In some embodiments, the masked IL-2 cytokine comprises a polypeptide chain comprising formula 2:

N′HL-L2-MM-L1-C C′ (2)

[0466] where HL is the half life extension domain, L1 is the first linker, MM is the masking moiety, L2 is the second linker, and C is the IL-2 cytokine or functional fragment thereof, wherein at least the first linker comprises a proteolytically cleavable peptide. In some embodiments, the first linker is a cleavable linker as described anywhere herein. In some embodiments, the second linker is a non-cleavable linker as described anywhere herein. In some embodiments, the IL-2 cytokine or functional fragment thereof is as described anywhere herein. In some embodiments, the half life extension domain (HL) comprises an Fc region of an antibody (i.e. the C-terminal region of an immunoglobulin heavy chain) or a fragment thereof comprising dimerized Fc domains (HL1-HL2). Although the boundaries of the Fc region of an immunoglobulin heavy chain might vary, the human IgG heavy-chain Fc region is usually defined to stretch from an amino acid residue at position Cys226, or from Pro230, to the carboxyl-terminus thereof. In some embodiments, the dimerized Fc domains of an antibody (HL1-HL2) comprises a first half life extension domain and a second half life extension domain as described anywhere herein, where the first half-life extension domain comprises a first Fc domain or a fragment thereof and the second half-life extension domain comprises a second Fc domain or a fragment thereof. In some embodiments, HL2 is a component of the polypeptide chain and HL1 is dimerized to HL2.

[0467] Cleavable peptides having an amino acid sequence as shown in SEQ ID NOs: 118 or 119 have been found to demonstrate very specific cleavage in the tumor cell environment compared to non-tumor cell environment.

[0468] In some embodiments, HL2 is a component of the polypeptide chain and HL1 is dimerized thereto such that:

[0469] a first polypeptide chain comprises:

N′HL1 C′

[0470] and a second polypeptide chain comprises:

N′HL2-L2-MM-L1-C C′

[0471] 4.3 Variant Masking Moieties

[0472] In some embodiments, the masking moiety is as described anywhere herein. In some embodiments, the masking moiety comprises IL-2Rβ or a fragment, portion or variant thereof. In some embodiments, the masking moiety comprises the amino acid sequence of SEQ ID NO: 4. In some embodiments, the masking moiety comprises an amino acid sequence having about or at least about 85%, 86%, 87%, 88%, 89%, 90%, 91%, 92%, 93%, 94%, 95%, 96%, 97%, 98%, or 99% sequence identity to the amino acid sequence of SEQ ID NO: 4. In some embodiments, the masking moiety comprises an amino acid sequence having the amino acid sequence of SEQ ID NO: 4 with one to four amino acid substitutions. In some embodiments, the masking moiety comprises an amino acid sequence having the amino acid sequence of SEQ ID NO: 4 with one or two amino acid substitutions. In some embodiments, the IL-2Rβ or a fragment, portion or variant thereof has mutation C122S at amino acid position 122 as compared to IL-2Rβ of SEQ ID NO: 4. In some embodiments, the masking moiety comprises an amino acid sequence of SEQ ID NO: 4 with a C122S mutation. In some embodiments, the IL-2Rβ or a fragment, portion or variant thereof has mutation C168S at amino acid position 168 as compared to IL-2Rβ of SEQ ID NO: 4. In some embodiments, the masking moiety comprises an amino acid sequence of SEQ ID NO: 4 with a C168S mutation. In some embodiments, the IL-2Rβ or a fragment, portion or variant thereof has mutations C122S and C168S as compared to IL-2Rβ of SEQ ID NO: 4. In some embodiments, the masking moiety comprises an amino acid sequence of SEQ ID NO: 5.

### 5. MASKED CYTOKINES WITH VARIANT HALF LIFE EXTENSION DOMAINS

[0473] Provided herein, are masked cytokines with variant half life extension domains.

[0474] In some embodiments, the masked IL-2 cytokine comprises a masking moiety and an IL-2 cytokine or functional fragment thereof, wherein the masking moiety masks the IL-2 cytokine or functional fragment thereof thereby reducing or preventing binding of the IL-cytokine or functional fragment thereof to its cognate receptor, and wherein a proteolytically cleavable peptide is present between the IL-2 fragment or functional fragment thereof and masking moiety.

[0475] An IgG1 Fc domain or fragment thereof is provided herein comprising the amino acid substitution I253A, numbered according to the Kabat EU numbering system.

[0476] An IgG1 Fc domain or fragment thereof is provided herein comprising the amino acid substitutions N297A and T253A, numbered according to the Kabat EU numbering system.

[0477] A dimer comprising a first polypeptide sequence comprising an IgG1 Fc domain or fragment thereof is provided herein comprising the amino acid substitution I253A and a second polypeptide sequence comprising an IgG1 Fc domain or fragment thereof comprising the amino acid substitution I253A.

[0478] A dimer comprising a first polypeptide sequence comprising an IgG1 Fc domain or fragment thereof is provided herein comprising the amino acid substitutions N297A and I253A and a second polypeptide sequence comprising an IgG1 Fc domain or fragment thereof comprising the amino acid substitutions N297A and I253A.

[0479] A dimer is provided herein comprising a first polypeptide sequence comprising SEQ ID NO: 10 and a second polypeptide sequence comprising SEQ ID NO: 13.

[0480] A masked cytokine comprising a masking moiety, an IL-2 cytokine or functional fragment thereof, and a half life extension domain is provided herein wherein the masking moiety masks the IL-2 cytokine or functional fragment thereof thereby reducing or preventing binding of the IL-2 cytokine or functional fragment thereof to its cognate receptor, and where a proteolytically cleavable peptide is present between the IL-2 cytokine or functional fragment thereof and the masking moiety, and half life extension domain comprises dimerized IgG1 Fc domains, as defined in anywhere herein.

[0481] 5.1 ‘Heterodimeric’ Masked Cytokines

[0482] In some embodiments, the masked IL-2 cytokine comprises a masking moiety in a first polypeptide chain and an IL-2 cytokine or functional fragment thereof in a second polypeptide chain. In some embodiments, the masked IL-2 cytokine is as described anywhere herein. In some embodiments, the masked IL-2 cytokine comprises formulae 6 (first polypeptide chain) and 5 (second polypeptide chain) below:

N′HL1-L1-MM C′ (6)

N′HL2-L2-C C′ (5)

[0483] where HL1 is the first half life extension domain, L1 is the first linker, MM is the masking moiety, HL2 is the second half life extension domain, L2 is the second linker, and C is the IL-2 cytokine or functional fragment thereof, wherein at least the first linker or the second linker comprises a proteolytically cleavable peptide. In some embodiments, the first half life extension domain, first linker, masking moiety, second half life extension domain, second linker, and IL-2 cytokine or functional fragment thereof are as described anywhere herein.

[0484] Cleavable peptides having an amino acid sequence as shown in SEQ ID NOs: 118 or 119 have been found to demonstrate very specific cleavage in the tumor cell environment compared to non-tumor cell environment.

[0485] 5.2 ‘Linear’ Masked Cytokines

[0486] In some embodiments, the masked IL-2 cytokine comprises a masking moiety and IL-2 cytokine or functional fragment thereof linked in a single polypeptide chain. In some embodiments, the masked IL-2 cytokine comprises a polypeptide chain comprising formula 1:

N′HL-L2-C-L1-MM C′ (1)

[0487] where HL is the half life extension domain, L1 is the first linker, MM is the masking moiety, L2 is the second linker, and C is the IL-2 cytokine or functional fragment thereof, wherein at least the first linker comprises a proteolytically cleavable peptide. In some embodiments, the masked IL-2 cytokine comprises a polypeptide chain comprising formula 2:

N′HL-L2-MM-L1-C C′ (2)

[0488] where HL is the half life extension domain, L1 is the first linker, MM is the masking moiety, L2 is the second linker, and C is the IL-2 cytokine or functional fragment thereof, wherein at least the first linker comprises a proteolytically cleavable peptide. In some embodiments, the IL-2 cytokine or functional fragment thereof is as described anywhere herein. In some embodiments, the masking moiety is as described anywhere herein. In some embodiments, the half life extension domain (HL) comprises an Fc region of an antibody (i.e. the C-terminal region of an immunoglobulin heavy chain) or a fragment thereof comprising dimerized Fc domains (HL1-HL2). Although the boundaries of the Fc region of an immunoglobulin heavy chain might vary, the human IgG heavy-chain Fc region is usually defined to stretch from an amino acid residue at position Cys226, or from Pro230, to the carboxyl-terminus thereof. In some embodiments, the dimerized Fc domains of an antibody (HL1-HL2) comprises a first half life extension domain and a second half life extension domain as described anywhere herein, where the first half-life extension domain comprises a first Fc domain or a fragment thereof and the second half-life extension domain comprises a second Fc domain or a fragment thereof. In some embodiments, HL2 is a component of the polypeptide chain and HL1 is dimerized to HL2.

[0489] In some embodiments, HL2 is a component of the polypeptide chain and HL1 is dimerized thereto such that:

[0490] a first polypeptide chain comprises:

N′HL1 C′

[0491] and a second polypeptide chain comprises:

N′HL2-L2-MM-L1-C C′

[0492] Cleavable peptides having an amino acid sequence as shown in SEQ ID NOs: 118 or 119 have been found to demonstrate very specific cleavage in the tumor cell environment compared to non-tumor cell environment. These cleavable peptides may therefore be used advantageously in combination with the variant half life extension domains disclosed herein.

[0493] 5.3 Variant Half Life Extension Domains

[0494] In some embodiments, the first and second half-life extension domains are each an IgG1 Fc domain or fragment thereof. In some embodiments, the first half-life extension domain comprises an IgG1 Fc domain or fragment thereof including the mutation I253A and the second half-life extension domain comprises an IgG1 Fc domain or fragment thereof including the mutation I253A. In some embodiments, the first and second half-life extension domains are derived from the sequence for human IgG1 Immunoglobulin heavy constant gamma 1 having SEQ ID NO: 6 (the ‘parent sequence’), such that the first and second half-life extension domains each comprise SEQ ID NO: 7 or fragment thereof, with one or more amino acid modifications. In some embodiments, the first and second half-life extension domains comprise SEQ ID NO: 7 with amino substitutions to promote association of the first and second half-life extension domains according to the ‘knob into holes’ approach. In some embodiments, the sequence SEQ ID NO: 7 contains mutations Y349C; T366S; L38A; and Y407V (numbered according to the Kabat EU numbering system) to form the ‘hole’ in the first half-life extension domain and mutations S354C and T366W (numbered according to the Kabat EU numbering system) to form the ‘knob’ in the second half-life extension domain. In some embodiments, the first and second half-life extension domains each further comprise amino substitution N297A, numbered according to the Kabat EU numbering system. In some embodiments, the first and second half-life extension domains each further comprise the amino substitution I253A, numbered according to the Kabat EU numbering system. In some embodiments, the first and second half-life extension domains each further comprise both the amino substitutions N297A and I253A, numbered according to the Kabat EU numbering system. In some embodiments, the first half-life extension domain comprises an amino acid sequence having about or at least about 85%, 86%, 87%, 88%, 89%, 90%, 91%, 92%, 93%, 94%, 95%, 96%, 97%, 98%, or 99% sequence identity to any one of the amino acid sequence of any one of SEQ ID NOs: 7, 8, 9 and 10. In some embodiments, the second half-life extension domain comprises an amino acid sequence having about or at least about 85%, 86%, 87%, 88%, 89%, 90%, 91%, 92%, 93%, 94%, 95%, 96%, 97%, 98%, or 99% sequence identity to any one of the amino acid sequence of any one of SEQ ID NOs: 7, 11, 12 and 13.

### 6. MASKED IL-2 CYTOKINE PRODUCTION

[0495] The masked cytokines described herein are prepared using techniques available in the art, exemplary methods of which are described.

[0496] 6.1 Antibody Production

[0497] Some embodiments of the masked IL-2 cytokine comprise an antibody or fragment thereof. The following sections provide further detail on the production of antibodies and antibody fragments, variants, and derivatives thereof, that may be used in some embodiments of the masked IL-2 cytokine provided herein. In some embodiments, the masked cytokine is in the form of a dimer produced by two copies of a masked IL-2 cytokine that are associated through disulfide bonds.

[0498] 1. Antibody Fragments

[0499] The present invention encompasses, in some embodiments, antibody fragments. The antibody fragments can be any antibody fragments, such as an Fc domain, a portion of the heavy chain, a portion of the light chain, an Fab, an Fv, or an scFv, among other fragments. Antibody fragments may be generated by traditional means, such as enzymatic digestion, or by recombinant techniques. In certain circumstances, there are advantages of linking antibody fragments, rather than whole antibodies, to the masked cytokines described herein. For a review of certain antibody fragments, see Hudson et al. (2003) Nat. Med. 9:129-134.

[0500] Various techniques have been developed for the production of antibody fragments. Traditionally, these fragments were derived via proteolytic digestion of intact antibodies (see, e.g., Morimoto et al., Journal of Biochemical and Biophysical Methods 24:107-117 (1992); and Brennan et al., Science, 229:81 (1985)). However, these fragments can now be produced directly by recombinant host cells. Fab, Fv and ScFv antibody fragments can all be expressed in and secreted from E. coli and other cell types, such as HEK293 and CHO cells, thus allowing the facile production of large amounts of these fragments. Alternatively, Fab-SH fragments can be directly recovered from culture media and chemically coupled to form F(ab)2 fragments (Carter et al., Bio/Technology 10: 163-167 (1992)). According to another approach, F(ab)2 fragments can be isolated directly from recombinant host cell culture. Fab and F(ab)2 fragments with increased in vivo half-life comprising FcRN/salvage receptor binding epitope residues are described in U.S. Pat. No. 5,869,046. Other techniques for the production of antibody fragments for use in the masked cytokines will be apparent to the skilled practitioner. In certain embodiments, a masked cytokine comprises a single chain Fv fragment (scFv). See WO 93/16185; U.S. Pat. Nos. 5,571,894; and 5,587,458. scFv fusion proteins may be constructed to yield fusion of an effector protein at either the amino or the carboxy terminus of an scFv. See Antibody Engineering, ed. Borrebaeck, supra. Also, in some embodiments, bi-scFv comprising two scFvs linked via a polypeptide linker can be used with the masked cytokines.

[0501] The present invention includes, in some embodiments, a linear antibody (e.g., as described in U.S. Pat. No. 5,641,870) or a single chain immunoglobulin comprising heavy and light chain sequences of the antibody linked via an appropriate linker. Such linear antibodies or immunoglobulins may be monospecific or bispecific. Such a single chain immunoglobulin can be dimerized to thereby maintain a structure and activities similar to those of the antibody, which is originally a tetramer. Also, in some embodiments, the antibody or fragment thereof may be an antibody that has a single heavy chain variable region and has no light chain sequence. Such an antibody is called a single domain antibody (sdAb) or a nanobody. These antibodies are also encompassed in the meaning of the functional fragment of the antibody according to the present invention. Antibody fragments can be linked to the masked cytokines described herein according to the guidance provided herein.

[0502] 2. Humanized Antibodies

[0503] The invention encompasses, in some embodiments, humanized antibodies or antibody fragments thereof. In some embodiments, the humanized antibodies can be any antibodies, including any antibody fragment. Various methods for humanizing non-human antibodies are known in the art. For example, a humanized antibody can have one or more amino acid residues introduced into it from a source which is non-human. These non-human amino acid residues are often referred to as “import” residues, which are typically taken from an “import” variable domain. Humanization can be essentially performed following the method of Winter (Jones et al. (1986) Nature 321:522-525; Riechmann et al. (1988) Nature 332:323-327; Verhoeyen et al. (1988) Science 239:1534-1536), by substituting hypervariable region sequences for the corresponding sequences of a human antibody. Accordingly, such “humanized” antibodies are chimeric antibodies (U.S. Pat. No. 4,816,567) wherein substantially less than an intact human variable domain has been substituted by the corresponding sequence from a non-human species. In practice, humanized antibodies are typically human antibodies in which some hypervariable region residues and possibly some FR residues are substituted by residues from analogous sites in rodent antibodies. Humanized antibodies can be linked to the masked cytokines described herein according to the guidance provided herein.

[0504] 3. Human Antibodies

[0505] Human antibodies of some embodiments of the invention can be constructed by combining Fv clone variable domain sequence(s) selected from human-derived phage display libraries with known human constant domain sequences(s). Alternatively, human monoclonal antibodies of some embodiments of the invention can be made by the hybridoma method, e.g., by using mouse, rat, bovine (e.g., cow), or rabbit cells, for example, to produce the human monoclonal antibodies. In some embodiments, the human antibodies and human monoclonal antibodies can be antibodies that bind to any antigen. In some embodiments, human monoclonal antibodies of the invention can be made by immunizing a non-human animal that comprises human immunoglobulin loci with the target antigen, and isolating the antibody from the immunized animal or from cells derived from the immunized animal. Examples of suitable non-human animals include a transgenic or transchromosomic animal, such as HuMAb Mouse® (Medarex, Inc.), KM Mouse®, “TC mice,” and Xenomouse™. See, e.g., Lonberg, et al. (1994) Nature 368: 856-859; Fishwild, D. et al. (1996) Nature Biotechnology 14: 845-851; WO2002/43478; U.S. Pat. Nos. 5,939,598; 6,075,181; 6,114,598; 6,150,584; 6,162,963; and Tomizuka et al. (2000) Proc. Natl. Acad. Sci. USA 97:722-727.

[0506] Human myeloma and murine-human heteromyeloma cell lines for the production of human monoclonal antibodies have been described, for example, by Kozbor J. Immunol., 133: 3001 (1984); Brodeur et al., Monoclonal Antibody Production Techniques and Applications, pp. 51-63 (Marcel Dekker, Inc., New York, 1987); and Boerner et al., J. Immunol., 147: 86 (1991). Human antibodies can be linked to the masked cytokines described herein according to the guidance provided herein.

[0507] 4. Bispecfic Antibodies

[0508] Bispecific antibodies are monoclonal antibodies that have binding specificities for at least two different antigens. In certain embodiments, bispecific antibodies are human or humanized antibodies. In some embodiments, one of the binding specificities is for a first antigen and the other binding specificity is for a second antigen, which may be either two different epitopes on the same target protein, or two different epitopes on two different target proteins. Bispecific antibodies may also be used to localize cytotoxic agents to cells which express the first antigen and/or the second antigen. Bispecific antibodies may also be used to recruit cells, such as T cells or natural killer cells, to kill certain cells, e.g., cancer cells. Bispecific antibodies can be prepared as full-length antibodies or antibody fragments (e.g. F(ab′)2 bispecific antibodies). Bispecific antibodies can be linked to the masked cytokines described herein according to the guidance provided herein.

[0509] Methods for making bispecific antibodies are known in the art. See Milstein and Cuello, Nature, 305: 537 (1983), WO 93/08829 published May 13, 1993, Traunecker et al., EMBO J., 10: 3655 (1991); Kontermann and Brinkmann, Drug Discovery Today, 20(7):838-847. For further details of generating bispecific antibodies see, for example, Suresh et al., Methods in Enzymology, 121:210 (1986). Bispecific antibodies include cross-linked or “heteroconjugate” antibodies. For example, one of the antibodies in the heteroconjugate can be coupled to avidin, the other to biotin. Heteroconjugate antibodies may be made using any convenient cross-linking method. Suitable cross-linking agents are well known in the art, and are disclosed in U.S. Pat. No. 4,676,980, along with a number of cross-linking techniques.

[0510] 5. Single-Domain Antibodies

[0511] In some embodiments, a single-domain antibody is linked to the masked cytokine in accordance with the guidance provided herein. The single-domain antibody can be any antibody. A single-domain antibody is a single polypeptide chain comprising all or a portion of the heavy chain variable domain or all or a portion of the light chain variable domain of an antibody. In certain embodiments, a single-domain antibody is a human single-domain antibody (Domantis, Inc., Waltham, Mass.; see, e.g., U.S. Pat. No. 6,248,516 B1). In some embodiments, a single-domain antibody consists of all or a portion of the heavy chain variable domain of an antibody. In some embodiment, the single domain antibody is a camelid-derived antibody obtained by immunization of a camelid with the target antigen. In some embodiments, the single domain antibody is a shark-derived antibody obtained by immunization of a shark with the target antigen. In some embodiments, the single domain antibody is a Nanobody (see, e.g., WO 2004041865A2 and US20070269422A1).

[0512] 6. Antibody Variants

[0513] In some embodiments, amino acid sequence modification(s) of the antibodies or fragments thereof described herein are contemplated. For example, it may be desirable to improve the FcRn-binding affinity and/or pH-dependent FcRn-binding affinity of the antibody. It may also be desirable to promote heterodimerization of antibody heavy chains by introducing certain amino acid modifications. Methods for promoting heterodimerization of antibody chains, including certain modifications that can be made to facilitate heterodimerization, is described by Klein et al. (2012), MAbs, 4(6): 653-663.

[0514] Amino acid sequence variants of the antibody may be prepared by introducing appropriate changes into the nucleotide sequence encoding the antibody, or by peptide synthesis. Such modifications include, for example, deletions from, and/or insertions into and/or substitutions of, residues within the amino acid sequences of the antibody. Any combination of deletion, insertion, and substitution can be made to arrive at the final construct, provided that the final construct possesses the desired characteristics. The amino acid alterations may be introduced in the subject antibody amino acid sequence at the time that sequence is made.

[0515] A useful method for identification of certain residues or regions of the antibody that are preferred locations for mutagenesis is called “alanine scanning mutagenesis” as described by Cunningham and Wells (1989) Science, 244:1081-1085. Here, a residue or group of target residues are identified (e.g., charged residues such as arg, asp, his, lys, and glu) and replaced by a neutral or negatively charged amino acid (e.g., alanine or polyalanine) to affect the interaction of the amino acids with antigen. Those amino acid locations demonshating functional sensitivity to the substitutions then are refined by introducing further or other variants at, or for, the sites of substitution. Thus, while the site for introducing an amino acid sequence variation is predetermined, the nature of the mutation per se need not be predetermined. For example, to analyze the performance of a mutation at a given site, ala scanning or random mutagenesis is conducted at the target codon or region and the expressed immunoglobulins are screened for the desired activity.

[0516] Amino acid sequence insertions include amino- and/or carboxyl-terminal fusions ranging in length from one residue to polypeptides containing a hundred or more residues, as well as intrasequence insertions of single or multiple amino acid residues. Examples of terminal insertions include an antibody with an N-terminal methionyl residue. Other insertional variants of the antibody molecule include the fusion to the N- or C-terminus of the antibody to an enzyme or a polypeptide which increases the serum half-life of the antibody.

[0517] In some embodiments, the masked cytokine is modified to eliminate, reduce, or otherwise hinder protease cleavage near the hinge region. The “hinge region” of an IgG is generally defined as including E216 and terminating at P230 of human IgG1 according to the EU index as in Kabat, but, functionally, the flexible portion of the chain may be considered to include additional residues termed the upper and lower hinge regions, such as from E216 to G237 (Roux et al., 1998 J Immunol 161:4083) and the lower hinge has been referred to as residues 233 to 239 of the Fc region where FcyR binding was generally attributed. Modifications to any of the masked cytokines described herein, can be performed, for example, according to the methods described in US 20150139984A1, which is incorporated herein by reference, as well as by incorporating any of the modifications described therein.

[0518] In some embodiments, FcRn mutations that improve pharmacokinetics include, but are not limited to, M428L, T250Q/M428L, M252Y/S254T/T256E, P257I/N434H, D376V/N434H, P257I/Q3111, N434A, N434W, M428L/N434S, V259I/V308F, M252Y/S254T/T256E, V259I/V308F/M428L, T307Q/N434A, T307Q/N434S, T307Q/E380A/N434A, V308P/N434A, N434H, V308P. In some embodiments, such mutations enhance antibody binding to FcRn at low pH but do not change the antibody affinity at neutral pH.

[0519] In certain embodiments, an antibody or fragment thereof is altered to increase or decrease the extent to which the antibody is glycosylated. Glycosylation of polypeptides is typically either N-linked or O-linked. N-linked refers to the attachment of a carbohydrate moiety to the side chain of an asparagine residue. The tripeptide sequences asparagine-X-serine and asparagine-X-threonine, where X is any amino acid except proline, are the recognition sequences for enzymatic attachment of the carbohydrate moiety to the asparagine side chain. Thus, the presence of either of these tripeptide sequences in a polypeptide creates a potential glycosylation site. O-linked glycosylation refers to the attachment of one of the sugars N-acetylgalactosamine, galactose, or xylose to a hydroxyamino acid, most commonly serine or threonine, although 5-hydroxyproline or 5-hydroxylysine may also be used.

[0520] Addition or deletion of glycosylation sites to the masked cytokine is conveniently accomplished by altering the amino acid sequence such that one or more of the above-described tripeptide sequences (for N-linked glycosylation sites) is created or removed. The alteration may also be made by the addition, deletion, or substitution of one or more serine or threonine residues to the sequence of the original antibody (for 0-linked glycosylation sites).

[0521] Where the antibody or fragment thereof comprises an Fc region, the carbohydrate attached thereto may be altered. For example, antibodies with a mature carbohydrate structure that lacks fucose attached to an Fc region of the antibody are described in US Pat Appl No US 2003/0157108 (Presta, L.). See also US 2004/0093621 (Kyowa Hakko Kogyo Co., Ltd). Antibodies with a bisecting N-acetylglucosamine (GlcNAc) in the carbohydrate attached to an Fc region of the antibody are referenced in WO 2003/011878, Jean-Mairet et al. and U.S. Pat. No. 6,602,684, Umana et al. Antibodies with at least one galactose residue in the oligosaccharide attached to an Fc region of the antibody are reported in WO 1997/30087, Patel et al. See, also, WO 1998/58964 (Raju, S.) and WO 1999/22764 (Raju, S.) concerning antibodies with altered carbohydrate attached to the Fc region thereof. See also US 2005/0123546 (Umana et al.) on antigen-binding molecules with modified glycosylation.

[0522] In certain embodiments, a glycosylation variant comprises an Fc region, wherein a carbohydrate structure attached to the Fc region lacks fucose or has reduced fucose. Such variants have improved ADCC function. Optionally, the Fc region further comprises one or more amino acid substitutions therein which further improve ADCC, for example, substitutions at positions 298, 333, and/or 334 of the Fc region (Eu numbering of residues). Examples of publications related to “defucosylated” or “fucose-deficient” antibodies include: US 2003/0157108; WO 2000/61739; WO 2001/29246; US 2003/0115614; US 2002/0164328; US 2004/0093621; US 2004/0132140; US 2004/0110704; US 2004/0110282; US 2004/0109865; WO 2003/085119; WO 2003/084570; WO 2005/035586; WO 2005/035778; WO2005/053742; Okazaki et al. J. Mol. Biol. 336:1239-1249 (2004); Yamane-Ohnuki et al. Biotech. Bioeng. 87: 614 (2004). Examples of cell lines producing defucosylated antibodies include Lee 13 CHO cells deficient in protein fucosylation (Ripka et al. Arch. Biochem. Biophys. 249:533-545 (1986); US Pat Appl No US 2003/0157108 A1, Presta, L; and WO 2004/056312 A1, Adams et al., especially at Example 11), and knockout cell lines, such as alpha-1,6-fucosyltransferase gene, FUT8, knockout CHO cells (Yamane-Ohnuki et al. Biotech. Bioeng. 87: 614 (2004)), and cells overexpressing (31,4-N-acetylglycosminyltransferase III (GnT-III) and Golgi p-mannosidase II (ManII).

[0523] In any of the embodiments herein, the masked cytokine can be engineered to improve antibody-dependent cell-mediated cytotoxicity (ADCC) activity. In some embodiments, the masked cytokine may be produced in a cell line having a alphal,6-fucosyltransferase (Fut8) knockout. In some embodiments, the host cells have been modified to have reduced intrinsic alphal,6-fucosylation activity. Examples of methods for modifying the fucosylation pathways in mammalian host cells can be found in, e.g., Yamane-Ohnuki and Satoh, MAbs, 1(3): 230-236 (2009), the contents of which are incorporated herein by reference. Examples of methods and compositions for partially or completely inactivating the expression of the FUT8 gene can be found in, e.g., US Pub. No. 20160194665A 1; WO2006133148A2, the contents of which are incorporated herein by reference. In some embodiments, the masked cytokine is produced in the Lecl3 variant of CHO cells (see, e.g., Shields et al., J. Biol. Chem., 277(30):26733-40 (2002)) or the YB2/0 cell line having reduced FUT8 activity (see, e.g., Shinkawa et al., J. Biol. Chem., 278(5): 3466-73 (2003)). In some embodiments, small interfering RNA (siRNA) against genes relevant to alphal,6-fucosylation can be introduced (see, e.g., Mori et al., Biotechnol. Bioeng. 88(7): 901-908 (2004); Imai-Nishiya et al., BMC Biotechnol. 7: 84 (2007); Omasa et al., J. Biosci. Bioeng., 106(2): 168¬173 (2008)). In some further embodiments, the masked cytokine may be produced in a cell line overexpressing |31,4-N-acetylglycosminyltransferase III (GnT-III). In further embodiments, the cell line additionally overexpresses Golgi p-mannosidase II (Manll). In some of the embodiments herein, the masked cytokine may comprise at least one amino acid substitution in the Fc region that improves ADCC activity.

[0524] In some embodiments, the masked cytokine is altered to improve its serum half-life. To increase the serum half-life of the cytokine, one may incorporate a FcRN/salvage receptor binding epitope into a linked antibody (especially an antibody fragment) as described in U.S. Pat. No. 5,739,277, for example. As used herein, the term “salvage receptor binding epitope” refers to an epitope of the Fc region of an IgG molecule (e.g., IgG1, IgG2, IgG3, or IgG4) that is responsible for increasing the in vivo serum half-life of the IgG molecule (US 2003/0190311, U.S. Pat. Nos. 6,821,505; 6,165,745; 5,624,821; 5,648,260; 6,165,745; 5,834,597).

[0525] Another type of variant is an amino acid substitution variant. These variants have at least one amino acid residue in the antibody molecule replaced by a different residue. Sites of interest for substitutional mutagenesis include the hypervariable regions, but FR alterations are also contemplated. Conservative substitutions are shown in Table 2 under the heading of “preferred substitutions.” If such substitutions result in a desirable change in biological activity, then more substantial changes, denominated “exemplary substitutions” in Table 2, or as further described below in reference to amino acid classes, may be introduced and the products screened.

TABLE 2

| Original | | Preferred |
|---|---|---|
| Residue | Exemplary Substitutions | Substitutions |
| Ala (A) | Val; Leu; Ile | Val |
| Arg (R) | Lys; Gln; Asn | Lys |
| Asn (N) | Gln; His; Asp, Lys; Arg | Gln |
| Asp (D) | Glu; Asn | Glu |
| Cys (C) | Ser; Ala | Ser |
| Gln (Q) | Asn; Glu | Asn |
| Glu (E) | Asp; Gln | Asp |
| Gly (G) | Ala | Ala |
| His (H) | Asn; Gln; Lys; Arg | Arg |
| Ile (I) | Leu; Val; Met; Ala; Phe; Norleucine | Leu |
| Leu (L) | Norleucine; Ile; Val; Met; Ala; Phe | Ile |
| Lys (K) | Arg; Gln; Asn | Arg |
| Met (M) | Leu; Phe; Ile | Leu |
| Phe (F) | Trp; Leu; Val; Ile; Ala; Tyr | Tyr |
| Pro (P) | Ala | Ala |
| Ser (S) | Thr | Thr |
| Thr (T) | Val; Ser | Ser |
| Trp (W) | Tyr; Phe | Tyr |
| Tyr (V) | Trp; Phe; Thr; Ser | Phe |
| Val (V) | Ile; Leu; Met; Phe; Ala; Norleucine | Leu |

[0526] Substantial modifications in the biological properties of the antibody are accomplished by selecting substitutions that differ significantly in their effect on maintaining (a) the structure of the polypeptide backbone in the area of the substitution, for example, as a sheet or helical conformation, (b) the charge or hydrophobicity of the molecule at the target site, or c) the bulk of the side chain. Amino acids may be grouped according to similarities in the properties of their side chains (in A. L. Lehninger, in Biochemist, second ed., pp. 73-75, Worth Publishers, New York (1975)):

[0527] (1) non-polar: Ala (A), Val (V), Leu (L), lie (I), Pro (P), Phe (F), Trp (WV), Met (M)

[0528] (2) uncharged polar: Gly (G), Ser (S), Thr (T), Cys (C), Tyr (Y), Asn (N), Gin (Q)

[0529] (3) acidic: Asp (D), Glu (E)

[0530] (4) basic: Lys (K), Arg (R), His (H)

[0531] Alternatively, naturally occurring residues may be divided into groups based on common side-chain properties:

[0532] (1) hydrophobic: Norleucine, Met, Ala, Val, Leu, he;

[0533] (2) neutral hydrophilic: Cys, Ser, Thr, Asn, Gin;

[0534] (3) acidic: Asp, Glu;

[0535] (4) basic: His, Lys, Arg;

[0536] (5) residues that influence chain orientahon: Gly, Pro;

[0537] (6) aromatic: Trp, Tyr, Phe.

[0538] Non-conservative substitutions will entail exchanging a member of one of these classes for another class. Such substituted residues also may be introduced into the conservative substitution sites or, into the remaining (non-conserved) sites.

[0539] Another type of substitutional variant involves the substitution of a naturally occurring amino acid residue for a non-naturally occurring amino acid residue. Non-naturally occurring amino acid residues can be incorporated, e.g., through tRNA recoding, or through any of the methods as described, e.g., in WO 2016154675A1, which is incorporated herein by reference.

[0540] One type of substitutional variant involves substituting one or more hypervariable region residues of a parent antibody (e.g., a humanized or human antibody). Generally, the resulting variant(s) selected for further development will have modified (e.g., improved) biological properties relative to the parent antibody from which they are generated. A convenient way for generating such substitutional variants involves affinity maturation using phage display, yeast display, or mammalian display. Briefly, several hypervariable region sites (e.g., 6-7 sites) are mutated to generate all possible amino acid substitutions at each site. The antibodies thus generated are displayed from filamentous phage particles as fusions to at least part of a phage coat protein (e.g., the gene III product of M13) packaged within each particle. The phage-displayed variants are then screened for their biological activity (e.g., binding affinity). In order to identify candidate hypervariable region sites for modification, scanning mutagenesis (e.g., alanine scanning) can be performed to identify hypervariable region residues contributing significantly to antigen binding. Alternatively, or additionally, it may be beneficial to analyze a crystal structure of the antigen-antibody complex to identify contact points between the antibody and antigen. Such contact residues and neighbouring residues are candidates for substitution according to techniques known in the art, including those elaborated herein. Once such variants are generated, the panel of variants is subjected to screening using techniques known in the art, including those described herein, and antibodies with superior properties in one or more relevant assays may be selected for further development.

[0541] Nucleic acid molecules encoding amino acid sequence variants of the masked cytokines are prepared by a variety of methods known in the art. These methods include, but are not limited to, isolation from a natural source (in the case of naturally occurring amino acid sequence variants) or preparation by oligonucleotide-mediated (or site-directed) mutagenesis, PCR mutagenesis, and cassette mutagenesis of an earlier prepared variant or a non-variant version of the antibody, for example.

[0542] It may be desirable to introduce one or more amino acid modifications in an Fc region of antibodies of the invention, thereby generating an Fc region variant. The Fc region variant may comprise a human Fc region sequence (e.g., a human IgG1, IgG2, IgG3 or IgG4 Fc region) comprising an amino acid modification (e.g. a substitution) at one or more amino acid positions including that of a hinge cysteine.

[0543] In some embodiments, a masked cytokine provided herein includes an antibody or fragment thereof having an IgG1, IgG2, IgG3, or IgG4 isotype with enhanced effector function. In some embodiments, a masked cytokine provided herein includes an antibody or fragment thereof having an IgG1 isotype with enhanced effector function. In some embodiments, a masked cytokine provided herein has an IgG1 isotype with enhanced effector function. In some embodiments, the masked cytokine is afucosylated. In some embodiments, the masked cytokine has increased levels of mannose moieties. In some embodiments, the masked cytokine has increased levels of bisecting glycan moieties. In some embodiments, the IgG1 comprises amino acid mutations.

[0544] In some embodiments, a masked cytokine provided herein includes an antibody having an IgG1 isotype (e.g., a human IgG1 isotype). In some embodiments, the IgG1 comprises one or more amino acid substitutions that enhance effector function. In one embodiment, the IgG1 comprises the amino acid substitutions S298A, E333A, and K334A wherein the amino acid residues are numbered according to the EU index as in Kabat. In one embodiment, the IgG1 comprises the amino acid substitutions S239D and I332E wherein the amino acid residues are numbered according to the EU index as in Kabat. In one embodiment, the IgG1 comprises the amino acid substitutions S239D, A330L, and I332E wherein the amino acid residues are numbered according to the EU index as in Kabat. In one embodiment, the IgG1 comprises the amino acid substitutions P247I and A339D or A339Q wherein the amino acid residues are numbered according to the EU index as in Kabat. In one embodiment, the IgG1 comprises the amino acid substitutions D280H, K290S with or without S298D or S298V wherein the amino acid residues are numbered according to the EU index as in Kabat. In one embodiment, the IgG1 comprises the amino acid substitutions F243L, R292P, and Y300L wherein the amino acid residues are numbered according to the EU index as in Kabat. In one embodiment, the IgG1 comprises the amino acid substitutions F243L, R292P, Y300L, and P396L wherein the amino acid residues are numbered according to the EU index as in Kabat. In one embodiment, the IgG1 comprises the amino acid substitutions F243L, R292P, Y300L, V305I, and P396L wherein the amino acid residues are numbered according to the EU index as in Kabat. In one embodiment, the IgG1 comprises the amino acid substitutions G236A, S239D, and I332E wherein the amino acid residues are numbered according to the EU index as in Kabat. In one embodiment, the IgG1 comprises the amino acid substitutions K326A and E333A wherein the amino acid residues are numbered according to the EU index as in Kabat. In one embodiment, the IgG1 comprises the amino acid substitutions K326W and E333S wherein the amino acid residues are numbered according to the EU index as in Kabat. In one embodiment, the IgG1 comprises the amino acid substitutions K290E, S298G, T299A, with or without K326E wherein the amino acid residues are numbered according to the EU index as in Kabat. In one embodiment, the IgG1 comprises the amino acid substitutions K290N, S298G, T299A, with or without K326E wherein the amino acid residues are numbered according to the EU index as in Kabat. In one embodiment, the IgG1 comprises the amino acid substitution K334V wherein the amino acid residues are numbered according to the EU index as in Kabat. In one embodiment, the IgG1 comprises the amino acid substitutions L235S, S239D, and K334V wherein the amino acid residues are numbered according to the EU index as in Kabat. In one embodiment, the IgG1 comprises the amino acid substitutions K334V and Q331M, S239D, F243V, E294L, or S298T wherein the amino acid residues are numbered according to the EU index as in Kabat. In one embodiment, the IgG1 comprises the amino acid substitutions E233L, Q311M, and K334V wherein the amino acid residues are numbered according to the EU index as in Kabat. In one embodiment, the IgG1 comprises the amino acid substitutions L234I, Q311M, and K334V wherein the amino acid residues are numbered according to the EU index as in Kabat. In one embodiment, the IgG1 comprises the amino acid substitutions K334V and S298T, A330M, or A330F wherein the amino acid residues are numbered according to the EU index as in Kabat. In one embodiment, the IgG1 comprises the amino acid substitutions K334V, Q311M, and either A330M or A330F wherein the amino acid residues are numbered according to the EU index as in Kabat. In one embodiment, the IgG1 comprises the amino acid substitutions K334V, S298T, and either A330M or A330F wherein the amino acid residues are numbered according to the EU index as in Kabat. In one embodiment, the IgG1 comprises the amino acid substitutions K334V, S239D, and either A330M or S298T wherein the amino acid residues are numbered according to the EU index as in Kabat. In one embodiment, the IgG1 comprises the amino acid substitutions L234Y, Y296W, and K290Y, F243V, or E294L wherein the amino acid residues are numbered according to the EU index as in Kabat. In one embodiment, the IgG1 comprises the amino acid substitutions Y296W and either L234Y or K290Y wherein the amino acid residues are numbered according to the EU index as in Kabat. In one embodiment, the IgG1 comprises the amino acid substitutions S239D, A330S, and I332E wherein the amino acid residues are numbered according to the EU index as in Kabat.

[0545] In some embodiments, the IgG1 comprises one or more amino acid substitutions that decrease or inhibit effector function. In one embodiment, the IgG1 comprises the amino acid substitution N297A, N297G, or N297Q wherein the amino acid residues are numbered according to the EU index as in Kabat. In one embodiment, the IgG1 comprises the amino acid substitution L234A or L235A wherein the amino acid residues are numbered according to the EU index as in Kabat. In one embodiment, the IgG1 comprises the amino acid substitutions C220S, C226S, C229S, and P238S wherein the amino acid residues are numbered according to the EU index as in Kabat. In one embodiment, the IgG1 comprises the amino acid substitutions C226S, C229S, E233P, L234V, and L235A wherein the amino acid residues are numbered according to the EU index as in Kabat. In one embodiment, the IgG1 comprises the amino acid substitutions L234F, L235E, and P331S wherein the amino acid residues are numbered according to the EU index as in Kabat. In one embodiment, the IgG1 comprises the amino acid substitutions S267E and L328F wherein the amino acid residues are numbered according to the EU index as in Kabat.

[0546] In accordance with this description and the teachings of the art, it is contemplated that in some embodiments, an antibody or fragment thereof of the masked cytokine may comprise one or more alterations as compared to the wild type counterpart antibody, e.g. in the Fc region. For example, it is thought that certain alterations can be made in the Fc region that would result in altered (i.e., either improved or diminished) C1q binding and/or Complement Dependent Cytotoxicity (CDC), e.g., as described in WO99/51642. See also Duncan & Winter Nature 322:738-40 (1988); U.S. Pat. Nos. 5,648,260; 5,624,821; and WO94/29351 concerning other examples of Fc region variants. WO00/42072 (Presta) and WO 2004/056312 (Lowman) describe antibody variants with improved or diminished binding to FcRs. The content of these patent publications are specifically incorporated herein by reference. See also Shields et al. J. Biol. Chem. 9(2): 6591-6604 (2001). Antibodies with increased half-lives and improved binding to the neonatal Fc receptor (FcRn), which is responsible for the transfer of maternal IgGs to the fetus (Guyer et al., J. Immunol. 117:587 (1976) and Kim et al., J. Immunol. 24:249 (1994)), are described in US2005/0014934A1 (Hinton et al.). These antibodies comprise an Fc region with one or more substitutions therein which improve binding of the Fc region to FcRn. Polypeptide variants with altered Fc region amino acid sequences and increased or decreased C1q binding capability are described in U.S. Pat. No. 6,194,551B1, WO99/51642. The contents of those patent publications are specifically incorporated herein by reference. See, also, Idusogie et al. J. Immunol. 164: 4178-4184 (2000).

[0547] 6.2 Masked IL-2 Cytokine-Drug Conjugates

[0548] The invention also provides masked IL-2 cytokine-drug conjugates (MCDCs) comprising a masked IL-2 cytokine provided herein, which can be any IL-2 masked cytokine disclosed herein, conjugated to one or more agents. In some embodiments, the one or more agents is a cytotoxic agent, such as a chemotherapeutic agent or drug, growth inhibitory agent, toxin (e.g., protein toxin, enzymatically active toxin of bacterial, fungal, plant, or animal origin, or fragments thereof), or radioactive isotopes. In some embodiments, the one or more agents is an immune stimulant.

[0549] In some embodiments, the one or more drugs conjugated to the masked IL-2 cytokine includes, but is not limited to, a maytansinoid (see U.S. Pat. Nos. 5,208,020, 5,416,064 and European Patent EP 0 425 235 B1); an auristatin such as monomethylauristatin drug moieties DE and DF (MMAE and MMAF) (see U.S. Pat. Nos. 5,635,483 and 5,780,588, and 7,498,298); a dolastatin; a calicheamicin or derivative thereof (see U.S. Pat. Nos. 5,712,374, 5,714,586, 5,739,116, 5,767,285, 5,770,701, 5,770,710, 5,773,001, and 5,877,296; Hinman et ak, Cancer Res. 53:3336-3342 (1993); and Lode et ak, Cancer Res. 58:2925-2928 (1998)); an anthracycline such as daunomycin or doxorubicin (see Kratz et ak, Current Med. Chem. 13:477-523 (2006); Jeffrey et ak, Bioorganic & Med. Chem. Letters 16:358-362 (2006); Torgov et ak, Bioconj. Chem. 16:717-721 (2005); Nagy et ak, Proc. Natl. Acad. Sci. USA 97:829-834 (2000); Dubowchik et ak, Bioorg. & Med. Chem. Letters 12:1529-1532 (2002); King et ak, J. Med. Chem. 45:4336-4343 (2002); and U.S. Pat. No. 6,630,579); methotrexate; vindesine; a taxane such as docetaxel, paclitaxel, larotaxel, tesetaxel, and ortataxel; a trichothecene; and CC1065.

[0550] In another embodiment, the one or more drugs conjugated to the masked IL-2 cytokine includes, but is not limited to, an inhibitor of tubulin polymerization (e.g., maytansinoids and auristatins), DNA damaging agents (e.g., pyrrolobenzodiazepine (PBD) dimers, calicheamicins, duocarmycins and indo-linobenzodiazepine dimers), and DNA synthesis inhibitors (e.g., exatecan derivative Dxd).

[0551] In another embodiment, a masked IL-2 cytokine-drug conjugate comprises a masked IL-2 cytokine as described herein conjugated to an enzymatically active toxin or fragment thereof, including, but not limited to, diphtheria A chain, nonbinding active fragments of diphtheria toxin, exotoxin A chain (from Pseudomonas aeruginosa), ricin A chain, abrin A chain, modeccin A chain, alpha-sarcin, Aleurites fordii proteins, dianthin proteins, Phytolaca americana proteins (PAPI, PAPII, and PAP-S), Momordica charantia inhibitor, curcin, crotin, Sapaonaria officinalis inhibitor, gelonin, mitogellin, restrictocin, phenomycin, enomycin, and the tricothecenes.

[0552] In another embodiment, a masked IL-2 cytokine-drug conjugate comprises a masked IL-2 cytokine as described herein conjugated to a radioactive atom to form a radioconjugate. A variety of radioactive isotopes are available for the production of radioconjugates. Examples include At211, 1131, 1125, Y90, Rel86, Rel88, Sm153, B1212, P32, Pb212 and radioactive isotopes of Lu. When the radioconjugate is used for detection, it may comprise a radioactive atom for scintigraphic studies, for example tc99m or 1123, or a spin label for nuclear magnetic resonance (NMR) imaging (also known as magnetic resonance imaging, mri), such as iodine-123 again, iodine-131, indium-111, fluorine-19, carbon-13, nitrogen-15, oxygen-17, gadolinium, manganese or iron.

[0553] In some embodiments, a masked IL-2 cytokine-drug conjugate comprises a masked IL-2 cytokine as described herein conjugated to one or more immune stimulants. In some embodiments, the immune stimulant is a stimulator of interferon genes (STING) agonist or a toll-like receptor (TER) agonist.

[0554] The STING agonist can be any agonist of STING. In some embodiments, the STING agonist is a cyclic dinucleotide (CDN). The CDN can be any CDN or derivative or variant thereof. In some embodiments, the STING agonist is a CDN selected from the group consisting of cGAMP, c-di-AMP, c-di-GMP, cAIMP, and c-di-IMP. In some embodiments, the STING agonist is a derivative or variant of a CDN selected from the group consisting of cGAMP, c-di-AMP, c-di-GMP, cAIMP, and c-di-IMP. In some embodiments, the STING agonist is 4-(2-chloro-6-fluorobenzyl)-N-(furan-2-ylmethyl)-3-oxo-3,4-dihydro-2H-benzo[b][1,4]thiazine-6-carboxamide, or a derivative or variant thereof. See, e.g., Sali et al. (2015) PloS Pathog., 11(12): e!005324.

[0555] The TLR agonist can be an agonist of any TLR, such as TLR1, TLR2, TLR3, TLR4, TLR5, TLR6, TLR7, TLR8, TLR9, or TLR10. In some embodiments, the TLR agonist is an agonist of a TLR expressed on the cell surface, such as TLR1, TLR2, TLR4, or TLR5. In some embodiments, the TLR agonist is an agonist of a TLR expressed intracellularly, such as TLR3, TLR7, TLR8, TLR9, or TLR10.

[0556] Conjugates of a masked IL-2 cytokine and a cytotoxic agent may be made using a variety of bifunctional protein coupling agents such as N-succinimidyl-3-(2-pyridyldithio) propionate (SPDP), succinimidyl-4-(N-maleimidomethyl) cyclohexane-1-carboxylate (SMCC), iminothiolane (IT), bifunctional derivatives of imidoesters (such as dimethyl adipimidate HCl), active esters (such as disuccinimidyl suberate), aldehydes (such as glutaraldehyde), bis-azido compounds (such as bis (p-azidobenzoyl) hexanediamine), bis-diazonium derivatives (such as bis-(p-diazoniumbenzoyl)-ethylenediamine), diisocyanates (such as toluene 2,6-diisocyanate), and bis-active fluorine compounds (such as 1,5-difluoro-2,4-dinitrobenzene). For example, a ricin immunotoxin can be prepared as described in Vitetta et ah, Science 238:1098 (1987). Carbon-14-labeled 1-isothiocyanatobenzyl-3-methyldiethylene triaminepentaacetic acid (MX-DTPA) is an exemplary chelating agent for conjugation of radionucleotide to an antibody. See WO94/11026. The linker may be a “cleavable linker” facilitating release of a cytotoxic drug in the cell. For example, an acid-labile linker, peptidase-sensitive linker, photolabile linker, dimethyl linker or disulfide-containing linker (Chari et ah, Cancer Res. 52:127-131 (1992); U.S. Pat. No. 5,208,020) may be used.

[0557] The MCDCs herein expressly contemplate, but are not limited to such conjugates prepared with cross-linker reagents including, but not limited to, BMPS, EMCS, GMBS, HBVS, LC-SMCC, MBS, MPBH, SBAP, SIA, SIAB, SMCC, SMPB, SMPH, sulfo-EMCS, sulfo-GMBS, sulfo-KMUS, sulfo-MBS, sulfo-SIAB, sulfo-SMCC, and sulfo-SMPB, and SVSB (succinimidyl-(4-vinylsulfonejbenzoate) which are commercially available (e.g., from Pierce Biotechnology, Inc., Rockford, Ill., U.S.A).

[0558] 6.3 Vectors, Host Cells, and Recombinant Methods

[0559] For recombinant production of a IL-2 masked cytokine of the invention, the one or more nucleic acids encoding it is isolated and inserted into a replicable vector for further cloning (amplification of the DNA) or for expression. DNA encoding the masked IL-2 cytokine, including components thereof, is readily isolated and sequenced using conventional procedures. Many vectors are available. The choice of vector depends in part on the host cell to be used. Generally, host cells are of either prokaryotic or eukaryotic (generally mammalian) origin. It will be appreciated that constant regions of any isotype of antibody or fragment thereof, when applicable, can be used for this purpose, including IgG, IgM, IgA, IgD, and IgE constant regions, and that such constant regions can be obtained from any human or animal species. In some embodiments, one vector is used to encode the IL-2 masked cytokine. In some embodiments, more than one vector is used to encode the masked IL-2 cytokine.

[0560] 1. Generating Masked IL-2 Cytokines Using Prokaryotic Host Cells

[0561] a. Vector Construction

[0562] Polynucleotide sequences encoding polypeptide components of the masked cytokines of the invention can be obtained using standard recombinant techniques. Desired polynucleotide sequences of an antibody or antibody fragment thereof may be isolated and sequenced from antibody producing cells such as hybridoma cells. Alternatively, polynucleotides can be synthesized using nucleotide synthesizer or PGR techniques, or obtained from other sources. Once obtained, sequences encoding the components of the masked cytokine are inserted into a recombinant vector capable of replicating and expressing heterologous polynucleotides in prokaryotic hosts. Many vectors that are available and known in the art can be used for the purpose of the present invention. Selection of an appropriate vector will depend mainly on the size of the nucleic acids to be inserted into the vector and the particular host cell to be transformed with the vector. Each vector contains various components, depending on its function (amplification or expression of heterologous polynucleotide, or both) and its compatibility with the particular host cell in which it resides. The vector components generally include, but are not limited to: an origin of replication, a selection marker gene, a promoter, a ribosome binding site (RBS), a signal sequence, the heterologous nucleic acid insert and a transcription terminator sequence.

[0563] In general, plasmid vectors containing replicon and control sequences which are derived from species compatible with the host cell are used in connection with these hosts. The vector ordinarily carries a replication site, as well as marking sequences which are capable of providing phenotypic selection in transformed cells. For example, E. coli is typically transformed using pBR322, a plasmid derived from an E. coli species. pBR322 contains genes-encoding ampicillin (Amp) and tetracycline (Tet) resistance and thus provides easy means for identifying transformed cells. pBR322, its derivatives, or other microbial plasmids or bacteriophage may also contain, or be modified to contain, promoters which can be used by the microbial organism for expression of endogenous proteins. Examples of pBR322 derivatives used for expression of particular antibodies are described in detail in Carter et ah, U.S. Pat. No. 5,648,237.

[0564] In addition, phage vectors containing replicon and control sequences that are compatible with the host microorganism can be used as transforming vectors in connection with these hosts. For example, bacteriophage such as 7GEM.TM.-11 may be utilized in making a recombinant vector which can be used to transform susceptible host cells such as E. coli LE392.

[0565] The expression vector of the invention may comprise two or more promoter-cistron pairs, encoding each of the polypeptide components. A promoter is an untranslated regulatory sequence located upstream (5′) to a cistron that modulates its expression. Prokaryotic promoters typically fall into two classes, inducible and constitutive. Inducible promoter is a promoter that initiates increased levels of transcription of the cistron under its control in response to changes in the culture condition, e.g. the presence or absence of a nutrient or a change in temperature.

[0566] A large number of promoters recognized by a variety of potential host cells are well known. The selected promoter can be operably linked to cistron DNA encoding either chain of the masked cytokine by removing the promoter from the source DNA via restriction enzyme digestion and inserting the isolated promoter sequence into the vector of the invention. Both the native promoter sequence and many heterologous promoters may be used to direct amplification and/or expression of the target genes.

[0567] In some embodiments, heterologous promoters are utilized, as they generally permit greater transcription and higher yields of expressed target gene as compared to the native target polypeptide promoter.

[0568] Promoters suitable for use with prokaryotic hosts include the PhoA promoter, the [3-galactamase and lactose promoter systems, a tryptophan (trp) promoter system and hybrid promoters such as the tac or the trc promoter. However, other promoters that are functional in bacteria (such as other known bacterial or phage promoters) are suitable as well. Their nucleotide sequences have been published, thereby enabling a skilled worker operably to ligate them to cistrons encoding, for example, the target light and heavy chains for masked cytokines comprising a light and heavy chain (Siebenlist et al. (1980) Cell 20: 269) using linkers or adaptors to supply any required restriction sites.

[0569] In one aspect of the invention, each cistron within the recombinant vector comprises a secretion signal sequence component that directs translocation of the expressed polypeptides across a membrane. In general, the signal sequence may be a component of the vector, or it may be a part of the target polypeptide DNA that is inserted into the vector. The signal sequence selected for the purpose of this invention should be one that is recognized and processed (i.e. cleaved by a signal peptidase) by the host cell. For prokaryotic host cells that do not recognize and process the signal sequences native to the heterologous polypeptides, the signal sequence is substituted by a prokaryotic signal sequence selected, for example, from the group consisting of the alkaline phosphatase, penicillinase, Ipp, or heat-stable enterotoxin II (STII) leaders, LamB, PhoE, PelB, OmpA and MBP. In one embodiment of the invention, the signal sequences used in both cistrons of the expression system are STII signal sequences or variants thereof.

[0570] In another aspect, the production of the polypeptide components according to the invention can occur in the cytoplasm of the host cell, and therefore does not require the presence of secretion signal sequences within each cistron. In that regard, for embodiments comprising immunoglobulin light and heavy chains, for example, the light and heavy chains are expressed with or without the sequences for the masking moiety, linker sequence, etc., folded and assembled to form functional immunoglobulins within the cytoplasm. Certain host strains (e.g., the E. coli trxB-strains) provide cytoplasm conditions that are favorable for disulfide bond formation, thereby permitting proper folding and assembly of expressed protein subunits. Proba and Pluckthun Gene, 159:203 (1995).

[0571] Masked cytokines of the invention can also be produced by using an expression system in which the quantitative ratio of expressed polypeptide components can be modulated in order to maximize the yield of secreted and properly assembled antibodies of the invention. Such modulation is accomplished at least in part by simultaneously modulating translational strengths for the polypeptide components.

[0572] Prokaryotic host cells suitable for expressing masked cytokines of the invention include Archaebacteria and Eubacteria, such as Gram-negative or Gram-positive organisms. Examples of useful bacteria include Escherichia (e.g., E. coli), Bacilli (e.g., B. subtilis), Enterobacteria, Pseudomonas species (e.g., P. aeruginosa), Salmonella typhimurium, Serratia marcescans, Klebsiella, Proteus, Shigella, Rhizobia, Vitreoscilla, or Paracoccus. In one embodiment, gram-negative cells are used. In one embodiment, E. coli cells are used as hosts for the invention. Examples of E. coli strains include strain W3110 (Bachmann, Cellular and Molecular Biology, vol. 2 (Washington, D.C.: American Society for Microbiology, 1987), pp. 1190-1219; ATCC Deposit No. 27,325) and derivatives thereof, including strain 33D3 having genotype W3110 AfhuA (AtonA) ptr3 lac Iq lacL8 AompTA(nmpc-fepE) degP41 kanR (U.S. Pat. No. 5,639,635). Other strains and derivatives thereof, such as E. coli 294 (ATCC 31,446), E. coli B, E. colik 1776 (ATCC 31,537) and E. coli RV308 (ATCC 31,608) are also suitable. These examples are illustrative rather than limiting. Methods for constructing derivatives of any of the above-mentioned bacteria having defined genotypes are known in the art and described in, for example, Bass et ah, Proteins, 8:309-314 (1990). It is generally necessary to select the appropriate bacteria taking into consideration replicability of the replicon in the cells of a bacterium. For example, E. coli, Serratia, or Salmonella species can be suitably used as the host when well-known plasmids such as pBR322, pBR325, pACYC177, or pKN410 are used to supply the replicon. Typically, the host cell should secrete minimal amounts of proteolytic enzymes, and additional protease inhibitors may desirably be incorporated in the cell culture.

[0573] b. Masked Cytokine Production

[0574] Host cells are transformed with the above-described expression vectors and cultured in conventional nutrient media modified as appropriate for inducing promoters, selecting transformants, or amplifying the genes encoding the desired sequences.

[0575] Transformation means introducing DNA into the prokaryotic host so that the DNA is replicable, either as an extrachromosomal element or by chromosomal integrant. Depending on the host cell used, transformation is done using standard techniques appropriate to such cells. The calcium treatment employing calcium chloride is generally used for bacterial cells that contain substantial cell-wall barriers. Another method for transformation employs polyethylene glycol/DMSO. Yet another technique used is electroporation.

[0576] Prokaryotic cells used to produce the masked cytokines of the invention are grown in media known in the art and suitable for culture of the selected host cells. Examples of suitable media include luria broth (LB) plus necessary nutrient supplements. In some embodiments, the media also contains a selection agent, chosen based on the construction of the expression vector, to selectively permit growth of prokaryotic cells containing the expression vector. For example, ampicillin is added to media for growth of cells expressing ampicillin resistant gene.

[0577] Any necessary supplements besides carbon, nitrogen, and inorganic phosphate sources may also be included at appropriate concentrations introduced alone or as a mixture with another supplement or medium such as a complex nitrogen source. Optionally, the culture medium may contain one or more reducing agents selected from the group consisting of glutathione, cysteine, cystamine, thioglycollate, dithioerythritol and dithiothreitol.

[0578] The prokaryotic host cells are cultured at suitable temperatures. In certain embodiments, for E. coli growth, growth temperatures range from about 20° C. to about 39° C.; from about 25° C. to about 37° C.; or about 30° C. The pH of the medium may be any pH ranging from about 5 to about 9, depending mainly on the host organism. In certain embodiments, for E. coli, the pH is from about 6.8 to about 7.4, or about 7.0.

[0579] If an inducible promoter is used in the expression vector of the invention, protein expression is induced under conditions suitable for the activation of the promoter. In one aspect of the invention, PhoA promoters are used for controlling transcription of the polypeptides. Accordingly, the transformed host cells are cultured in a phosphate-limiting medium for induction. In certain embodiments, the phosphate-limiting medium is the C.R.A.P. medium (see, e.g., Simmons et ah, J. Immunol. Methods (2002), 263:133-147). A variety of other inducers may be used, according to the vector construct employed, as is known in the art.

[0580] In one embodiment, the expressed masked cytokines of the present invention are secreted into and recovered from the periplasm of the host cells. Protein recovery typically involves disrupting the microorganism, generally by such means as osmotic shock, sonication or lysis. Once cells are disrupted, cell debris or whole cells may be removed by centrifugation or filtration. The proteins may be further purified, for example, by affinity resin chromatography. Alternatively, proteins can be transported into the culture media and isolated therein. Cells may be removed horn the culture and the culture supernatant being filtered and concentrated for further purification of the proteins produced. The expressed polypeptides can be further isolated and identified using commonly known methods such as polyacrylamide gel electrophoresis (PAGE) and Western blot assay.

[0581] In one aspect of the invention, masked cytokine production is conducted in large quantity by a fermentation process. Various large-scale fed-batch fermentation procedures are available for production of recombinant proteins. Large-scale fermentations have at least 1000 liters of capacity, and in certain embodiments, about 1,000 to 100,000 liters of capacity. These fermenters use agitator impellers to distribute oxygen and nutrients, especially glucose. Small scale fermentation refers generally to fermentation in a fermentor that is no more than approximately 100 liters in volumetric capacity, and can range horn about 1 liter to about 100 liters.

[0582] In a fermentation process, induction of protein expression is typically initiated after the cells have been grown under suitable conditions to a desired density, e.g., an OD550 of about 180-220, at which stage the cells are in the early stationary phase. A variety of inducers may be used, according to the vector construct employed, as is known in the art and described above. Cells may be grown for shorter periods prior to induction. Cells are usually induced for about 12-50 hours, although longer or shorter induction time may be used.

[0583] To improve the production yield and quality of the polypeptides of the invention, various fermentation conditions can be modified. For example, to improve the proper assembly and folding of, for example, secreted antibody polypeptides, additional vectors overexpressing chaperone proteins, such as Dsb proteins (DsbA, DsbB, DsbC, DsbD and or DsbG) or FkpA (a peptidylprolyl cis,trans-isomerase with chaperone activity) can be used to co-transform the host prokaryotic cells. The chaperone proteins have been demonstrated to facilitate the proper folding and solubility of heterologous proteins produced in bacterial host cells. Chen et al. (1999) J. Biol. Chem. 274:19601-19605; Georgiou et ak, U.S. Pat. No. 6,083,715; Georgiou et ak, U.S. Pat. No. 6,027,888; Bothmann and Pluckthun (2000) J. Biol. Chem. 275:17100-17105; Ramm and Pluckthun (2000) J. Biol. Chem. 275:17106-17113; Arie et ak (2001) Mol. Microbiol. 39:199-210.

[0584] To minimize proteolysis of expressed heterologous proteins (especially those that are proteolytically sensitive), certain host strains deficient for proteolytic enzymes can be used for the present invention. For example, host cell strains may be modified to effect genetic mutation(s) in the genes encoding known bacterial proteases such as Protease III, OmpT, DegP, Tsp, Protease I, Protease Mi, Protease V, Protease VI and combinations thereof. Some E. coli protease-deficient strains are available and described in, for example, Joly et ak (1998), supra; Georgiou et ak, U.S. Pat. No. 5,264,365; Georgiou et ak, U.S. Pat. No. 5,508,192; Kara et ak, Microbial Drug Resistance, 2:63-72 (1996). In some embodiments, E. coli strains deficient for proteolytic enzymes and transformed with plasmids overexpressing one or more chaperone proteins are used as host cells in the expression system of the invention.

[0585] c. Masked Cytokine Purification

[0586] In some embodiments, the masked cytokine produced herein is further purified to obtain preparations that are substantially homogeneous for further assays and uses. Standard protein purification methods known in the art can be employed. The following procedures are exemplary of suitable purification procedures: fractionation on immunoaffinity or ion-exchange columns, ethanol precipitation, reverse phase HPLC, chromatography on silica or on a cation-exchange resin such as DEAE, chromatofocusing, SDS-PAGE, ammonium sulfate precipitation, and gel filtration using, for example, Sephadex G-75.

[0587] In some embodiments, Protein A immobilized on a solid phase is used for immunoaffinity purification of the masked cytokines of the invention. Protein A is a 41 kD cell wall protein from Staphylococcus aureas which binds with a high affinity to the Fc region of antibodies. Lindmark et al (1983) J. Immunol. Meth. 62:1-13. The solid phase to which Protein A is immobilized can be a column comprising a glass or silica surface, or a controlled pore glass column or a silicic acid column. In some applications, the column is coated with a reagent, such as glycerol, to possibly prevent nonspecific adherence of contaminants.

[0588] As the first step of purification, a preparation derived from the cell culture as described above can be applied onto a Protein A immobilized solid phase to allow specific binding of the masked cytokine of interest to Protein A. The solid phase would then be washed to remove contaminants non-specifically bound to the solid phase. Finally, the masked cytokine of interest is recovered from the solid phase by elution. Other methods of purification that provide for high affinity binding to a component of the masked cytokine can be employed in accordance with standard protein purification methods known in the art.

[0589] 2. Generating Masked Cytokines Using Eukaryotic Host Cells

[0590] A vector for use in a eukaryotic host cell generally includes one or more of the following non-limiting components: a signal sequence, an origin of replication, one or more marker genes, an enhancer element, a promoter, and a hanscription termination sequence.

[0591] a. Signal Sequence Component

[0592] A vector for use in a eukaryotic host cell may also contain a signal sequence or other polypeptide having a specific cleavage site at the N-terminus of the mature protein or polypeptide of interest. The heterologous signal sequence selected may be one that is recognized and processed (i.e., cleaved by a signal peptidase) by the host cell. In mammalian cell expression, mammalian signal sequences as well as viral secretory leaders, for example, the herpes simplex gD signal, are available.

[0593] The DNA for such a precursor region is ligated in reading frame to DNA encoding the masked cytokine.

[0594] b. Origin of Replication

[0595] Generally, an origin of replication component is not needed for mammalian expression vectors. For example, the SV40 origin may typically be used only because it contains the early promoter.

[0596] c. Selection Gene Component

[0597] Expression and cloning vectors may contain a selection gene, also termed a selectable marker. Typical selection genes encode proteins that (a) confer resistance to antibiotics or other toxins, e.g., ampicillin, neomycin, methotrexate, or tetracycline, (b) complement auxotrophic deficiencies, where relevant, or (c) supply critical nutrients not available from complex media.

[0598] One example of a selection scheme utilizes a drug to arrest growth of a host cell. Those cells that are successfully transformed with a heterologous gene produce a protein conferring drug resistance and thus survive the selection regimen. Examples of such dominant selection use the drugs neomycin, mycophenolic acid and hygromycin.

[0599] Another example of suitable selectable markers for mammalian cells are those that enable the identification of cells competent to take up the masked cytokine encoding nucleic acid, such as DHFR, thymidine kinase, metallothionein-I and -II, primate metallothionein genes, adenosine deaminase, ornithine decarboxylase, etc.

[0600] For example, in some embodiments, cells transformed with the DHFR selection gene are first identified by culturing all of the transformants in a culture medium that contains methotrexate (Mtx), a competitive antagonist of DHFR. In some embodiments, an appropriate host cell when wild-type DHFR is employed is the Chinese hamster ovary (CHO) cell line deficient in DHFR activity (e.g., ATCC CRL-9096).

[0601] Alternatively, host cells (particularly wild-type hosts that contain endogenous DHFR) transformed or co-transformed with DNA sequences encoding a masked cytokine, wild-type DHFR protein, and another selectable marker such as aminoglycoside 3′-phosphotransferase (APH) can be selected by cell growth in medium containing a selection agent for the selectable marker such as an aminoglycosidic antibiotic, e.g., kanamycin, neomycin, or G418. See U.S. Pat. No. 4,965,199. Host cells may include NS0, including cell lines deficient in glutamine synthetase (GS). Methods for the use of GS as a selectable marker for mammalian cells are described in U.S. Pat. Nos. 5,122,464 and 5,891,693.

[0602] d. Promoter Component

[0603] Expression and cloning vectors usually contain a promoter that is recognized by the host organism and is operably linked to nucleic acid encoding a masked cytokine of interest, which can be any masked cytokine described herein. Promoter sequences are known for eukaryotes. For example, virtually all eukaryotic genes have an AT-rich region located approximately 25 to 30 bases upstream from the site where transcription is initiated. Another sequence found 70 to 80 bases upstream from the start of transcription of many genes is a CNCAAT region where N may be any nucleotide. At the 3′ end of most eukaryotic genes is an AATAAA sequence that may be the signal for addition of the poly A tail to the 3′ end of the coding sequence. In certain embodiments, any or all of these sequences may be suitably inserted into eukaryotic expression vectors.

[0604] Transcription from vectors in mammalian host cells is controlled, for example, by promoters obtained from the genomes of viruses such as polyoma virus, fowlpox virus, adenovirus (such as Adenovirus 2), bovine papilloma virus, avian sarcoma virus, cytomegalovirus, a retrovirus, hepatitis-B virus and Simian Virus 40 (SV40), from heterologous mammalian promoters, e.g., the actin promoter or an immunoglobulin promoter, from heat-shock promoters, provided such promoters are compatible with the host cell systems.

[0605] The early and late promoters of the SV40 virus are conveniently obtained as an SV40 restriction fragment that also contains the SV40 viral origin of replication. The immediate early promoter of the human cytomegalovirus is conveniently obtained as a Hindlll E restriction fragment. A system for expressing DNA in mammalian hosts using the bovine papilloma virus as a vector is disclosed in U.S. Pat. No. 4,419,446. A modification of this system is described in U.S. Pat. No. 4,601,978. See also Reyes et ah, Nature 297:598-601 (1982), describing expression of human [3-interferon cDNA in murine cells under the control of a thymidine kinase promoter from herpes simplex virus. Alternatively, the Rous Sarcoma Virus long terminal repeat can be used as the promoter.

[0606] e. Enhancer Element Component

[0607] Transcription of DNA encoding a masked cytokine of this invention by higher eukaryotes is often increased by inserting an enhancer sequence into the vector. Many enhancer sequences are now known from mammalian genes (globin, elastase, albumin, a-fetoprotein, and insulin). Typically, however, one will use an enhancer from a eukaryotic cell virus. Examples include the SV40 enhancer on the late side of the replication origin (bp 100-270), the human cytomegalovirus early promoter enhancer, the murine cytomegalovirus early promoter enhancer, the polyoma enhancer on the late side of the replication origin, and adenovirus enhancers. See also Yaniv, Nature 297:17-18 (1982) (describing enhancer elements for activation of eukaryotic promoters). The enhancer may be spliced into the vector at a position 5′ or 3′ to the masked cytokine-encoding sequence, but is generally located at a site 5′ from the promoter.

[0608] f. Transcription Termination Component

[0609] Expression vectors used in eukaryotic host cells may also contain sequences necessary for the termination of transcription and for stabilizing the mRNA. Such sequences are commonly available from the 5′ and, occasionally 3′, untranslated regions of eukaryotic or viral DNAs or cDNAs. These regions contain nucleotide segments transcribed as polyadenylated fragments in the untranslated portion of the mRNA encoding a masked cytokine. One useful transcription termination component is the bovine growth hormone polyadenylation region. See WO94/11026 and the expression vector disclosed therein.

[0610] g. Selection and Transformation of Host Cells

[0611] Suitable host cells for cloning or expressing the DNA in the vectors herein include higher eukaryote cells described herein, including vertebrate host cells. Propagation of vertebrate cells in culture (tissue culture) has become a routine procedure. Examples of useful mammalian host cell lines are monkey kidney CV1 line transformed by SV40 (COS-7, ATCC CRL 1651); human embryonic kidney line (293 or 293 cells subcloned for growth in suspension culture, Graham et ah, J. Gen Virol. 36:59 (1977)); baby hamster kidney cells (BHK, ATCC CCL 10); Chinese hamster ovary cells/−DHFR (CHO, Urlaub et ah, Proc. Natl. Acad. Sci. USA 77:4216 (1980)); murine sertoli cells (TM4, Mather, Biol. Reprod. 23:243-251 (1980)); monkey kidney cells (CV1 ATCC CCL 70); African green monkey kidney cells (VERO-76, ATCC CRL-1587); human cervical carcinoma cells (HELA, ATCC CCL 2); canine kidney cells (MDCK, ATCC CCL 34); buffalo rat liver cells (BEL 3A, ATCC CRL 1442); human lung cells (W138, ATCC CCL 75); human liver cells (Hep G2, HB 8065); murine mammary tumor (MMT 060562, ATCC CCL51); TRI cells (Mather et ah, Annals N.Y. Acad. Sci. 383:44-68 (1982)); MRC 5 cells; FS4 cells; and a human hepatoma line (Hep G2).

[0612] Host cells are transformed with the above-described-expression or cloning vectors for masked cytokine production and cultured in conventional nutrient media modified as appropriate for inducing promoters, selecting transformants, or amplifying the genes encoding the desired sequences.

[0613] h. Culturing Host Cells

[0614] The host cells used to produce masked cytokines of this invention may be cultured in a variety of media. Commercially available media such as Ham's F10 (Sigma), Minimal Essential Medium ((MEM), Sigma), RPMI-1640 (Sigma), and Dulbecco's Modified Eagle's Medium ((DMEM), Sigma) are suitable for culturing the host cells. In addition, any of the media described in Ham et ah, Meth. Enz. 58:44 (1979), Barnes et ah, Anal. Biochem. 102:255 (1980), U.S. Pat. Nos. 4,767,704; 4,657,866; A,921,162\4,560,655; or 5,122,469; WO 90/03430; WO 87/00195; or U.S. Pat. Re. 30,985 may be used as culture media for the host cells. Any of these media may be supplemented as necessary with hormones and/or other growth factors (such as insulin, transferrin, or epidermal growth factor), salts (such as sodium chloride, calcium, magnesium, and phosphate), buffers (such as HEPES), nucleotides (such as adenosine and thymidine), antibiotics (such as GENTAMYCIN™ drug), trace elements (defined as inorganic compounds usually present at final concentrations in the micromolar range), and glucose or an equivalent energy source. Any other supplements may also be included at appropriate concentrations that would be known to those skilled in the art. The culture conditions, such as temperature, pH, and the like, are those previously used with the host cell selected for expression, and will be apparent to the ordinarily skilled artisan.

[0615] i. Purification of Masked Cytokines

[0616] When using recombinant techniques, the masked cytokines can be produced intracellularly, or directly secreted into the medium. If the masked cytokine is produced intracellularly, as a first step, the particulate debris, either host cells or lysed fragments, may be removed, for example, by centrifugation or ultrafiltration. Where the masked cytokine is secreted into the medium, supernatants from such expression systems may be first concentrated using a commercially available protein concentration filter, for example, an Amicon or Millipore Pellicon ultrafiltration unit. A protease inhibitor such as PMSF may be included in any of the foregoing steps to inhibit proteolysis, and antibiotics may be included to prevent the growth of adventitious contaminants.

[0617] The masked cytokine composition prepared from the cells can be purified using, for example, hydroxylapatite chromatography, gel electrophoresis, dialysis, and affinity chromatography, with affinity chromatography being a convenient technique. The suitability of protein A as an affinity ligand depends on the species and isotype of any immunoglobulin Fc domain, if any, that is present in the masked cytokine. Protein A can be used to purify antibodies that are based on human IgG1, IgG2, or IgG4 heavy chains (Lindmark et ak, J. Immunol. Methods 62:1-13 (1983)). Protein G is recommended for all murine isotypes and for human y3 (Guss et ak, EMBO J. 5:15671575 (1986)). The matrix to which the affinity ligand is attached may be agarose, but other matrices are available. Mechanically stable matrices such as controlled pore glass or poly(styrenedivinyl)benzene allow for faster flow rates and shorter processing times than can be achieved with agarose. Where the masked cytokine comprises a CH3 domain, the Bakerbond ABX™ resin (J. T. Baker, Phillipsburg, N.J.) is useful for purification.

[0618] Other techniques for protein purification such as fractionation on an ion-exchange column, ethanol precipitation, Reverse Phase HPLC, chromatography on silica, chromatography on heparin SEPHAROSE™ chromatography on an anion or cation exchange resin (such as a polyaspartic acid column), chromatofocusing, SDS-PAGE, and ammonium sulfate precipitation are also available depending on the masked cytokine to be recovered.

[0619] Following any preliminary purification step(s), the mixture comprising the masked cytokine of interest and contaminants may be subjected to further purification, for example, by low pH hydrophobic interaction chromatography using an elution buffer at a pH between about 2.5-4.5, performed at low salt concentrations (e.g., from about 0-0.25M salt).

[0620] In general, various methodologies for preparing masked cytokines for use in research, testing, and clinical use are well-established in the art, consistent with the above-described methodologies and/or as deemed appropriate by one skilled in the art for a particular masked cytokine of interest.

### 7. COMPOSITIONS

[0621] In some aspects, also provided herein are compositions comprising any of the IL-2 masked cytokines described herein. In some embodiments, the composition comprises any of the exemplary embodiments of masked IL-2 cytokine described herein. In some embodiments, the composition comprises a dimer of any of the masked IL-2 cytokines described herein. In some embodiments, the composition is a pharmaceutical composition. In some embodiments, the composition comprises a masked IL-2 cytokine and further comprises one or more of the components as described in detail below. For example, in some embodiments, the composition comprises one or more pharmaceutically acceptable carriers, excipients, stabilizers, buffers, preservatives, tonicity agents, non-ionic surfactants or detergents, or other therapeutic agents or active compounds, or combinations thereof. The various embodiments of the composition are sometimes referred to herein as formulations.

[0622] Therapeutic formulations are prepared for storage by mixing the active ingredient having the desired degree of purity with optional pharmaceutically acceptable carriers, excipients or stabilizers (Remington: The Science and Practice of Pharmacy, 20th Ed., Lippincott Williams & Wiklins, Pub., Gennaro Ed., Philadelphia, Pa. 2000). Acceptable carriers, excipients, or stabilizers are nontoxic to recipients at the dosages and concentrations employed, and include buffers, antioxidants including ascorbic acid, methionine, Vitamin E, sodium metabisulfite; preservatives, isotonicifiers, stabilizers, metal complexes (e.g. Zn-protein complexes); chelating agents such as EDTA and/or non-ionic surfactants.

[0623] Buffers can be used to control the pH in a range which optimizes the therapeutic effectiveness, especially if stability is pH dependent. Buffers can be present at concentrations ranging from about 50 mM to about 250 mM. Suitable buffering agents for use with the present invention include both organic and inorganic acids and salts thereof. For example, citrate, phosphate, succinate, tartrate, fumarate, gluconate, oxalate, lactate, acetate. Additionally, buffers may be comprised of histidine and trimethylamine salts such as Tris.

[0624] Preservatives can be added to prevent microbial growth, and are typically present in a range from about 0.2%-1.0% (w/v). Examples of suitable preservatives commonly used with therapeutics include octadecyldimethylbenzyl ammonium chloride; hexamethonium chloride; benzalkonium halides (e.g., chloride, bromide, iodide), benzethonium chloride; thimerosal, phenol, butyl or benzyl alcohol; alkyl parabens such as methyl or propyl paraben; catechol; resorcinol; cyclohexanol, 3-pentanol, m-cresol, o-cresol, p-cresol, methyl p-hydroxybenzoate, propyl p-hydroxybenzoate, 2-phenoxyethanol, butyl p-hydroxybenzoate, 2-phenylethanol, ethanol, chlorobutanol, thiomerosal, bronopol, benzoic acid, imidurea, chlorohexidine, sodium dehydroacetate, chlorocresol, ethyl p-hydroxybenzoate, and chlorphenesine (3p-chlorphenoxypropane-1,2-diol).

[0625] Tonicity agents, sometimes known as “stabilizers” can be present to adjust or maintain the tonicity of liquid in a composition. When used with large, charged biomolecules such as proteins and antibodies, they are often termed “stabilizers” because they can interact with the charged groups of the amino acid side chains, thereby lessening the potential for inter and intra-molecular interactions.

[0626] Tonicity agents can be present in any amount between about 0.1% to about 25% by weight or between about 1 to about 5% by weight, taking into account the relative amounts of the other ingredients. In some embodiments, tonicity agents include polyhydric sugar alcohols, trihydric or higher sugar alcohols, such as glycerin, erythritol, arabitol, xylitol, sorbitol and mannitol.

[0627] Additional excipients include agents which can serve as one or more of the following: (1) bulking agents, (2) solubility enhancers, (3) stabilizers and (4) and agents preventing denaturation or adherence to the container wall. Such excipients include: polyhydric sugar alcohols (enumerated above); amino acids such as alanine, glycine, glutamine, asparagine, histidine, arginine, lysine, ornithine, leucine, 2-phenylalanine, glutamic acid, threonine, etc.; organic sugars or sugar alcohols such as sucrose, lactose, lactitol, trehalose, stachyose, mannose, sorbose, xylose, ribose, ribitol, myoinisitose, myoinisitol, galactose, galactitol, glycerol, cyclitols (e.g., inositol), polyethylene glycol; sulfur containing reducing agents, such as urea, glutathione, thioctic acid, sodium thioglycolate, thioglycerol, a-monothioglycerol and sodium thio sulfate; low molecular weight proteins such as human serum albumin, bovine serum albumin, gelatin or other immunoglobulins; hydrophilic polymers such as polyvinylpyrrolidone; monosaccharides (e.g., xylose, mannose, fructose, glucose; disaccharides (e.g., lactose, maltose, sucrose); trisaccharides such as raffinose; and polysaccharides such as dextrin or dextran.

[0628] Non-ionic surfactants or detergents (also known as “wetting agents”) can be present to help solubilize the therapeutic agent as well as to protect the therapeutic protein against agitation-induced aggregation, which also permits the formulation to be exposed to shear surface stress without causing denaturation of the active therapeutic protein or antibody. Non-ionic surfactants are present in a range of about 0.05 mg/ml to about 1.0 mg/ml or about 0.07 mg/ml to about 0.2 mg/ml. In some embodiments, non-ionic surfactants are present in a range of about 0.001% to about 0.1% w/v or about 0.01% to about 0.1% w/v or about 0.01% to about 0.025% w/v.

[0629] Suitable non-ionic surfactants include polysorbates (20, 40, 60, 65, 80, etc.), polyoxamers (184, 188, etc.), PLURONIC® polyols, TRITON®, polyoxyethylene sorbitan monoethers (TWEEN®-20, TWEEN®-80, etc.), lauromacrogol 400, polyoxyl 40 stearate, polyoxyethylene hydrogenated castor oil 10, 50 and 60, glycerol monostearate, sucrose fatty acid ester, methyl celluose and carboxymethyl cellulose. Anionic detergents that can be used include sodium lauryl sulfate, dioctyle sodium sulfosuccinate and dioctyl sodium sulfonate. Cationic detergents include benzalkonium chloride or benzethonium chloride.

[0630] In order for the formulations to be used for in vivo administration, they must be sterile. The formulation may be rendered sterile by filtration through sterile filtration membranes. The therapeutic compositions herein generally are placed into a container having a sterile access port, for example, an intravenous solution bag or vial having a stopper pierceable by a hypodermic injection needle.

[0631] The route of administration is in accordance with known and accepted methods, such as by single or multiple bolus or infusion over a long period of time in a suitable manner, e.g., injection or infusion by subcutaneous, intravenous, intraperitoneal, intramuscular, intraarterial, intralesional or intraarticular routes, topical administration, inhalation or by sustained release or extended-release means.

[0632] Any of the masked IL-2 cytokines described herein can be used alone or in combination with other therapeutic agents such is in the methods described herein. The term “in combination with” encompasses two or more therapeutic agents (e.g., a masked IL-2 cytokine and a therapeutic agent) that are included in the same or separate formulations. In some embodiments, “in combination with” refers to “simultaneous” administration, in which case administration of the masked IL-2 cytokine of the invention occurs simultaneously to the administration of the one or more additional therapeutic agents (e.g., at the same time or within one hour between administration (s) of the masked IL-2 cytokine and administration of the one or more additional therapeutic agents). In some embodiments, “in combination with” refers to sequential administration, in which case administration of the masked IL-2 cytokine of the invention occurs prior to and/or following, administration of the one or more additional therapeutic agents (e.g., greater than one hour between administration (s) of the masked IL-2 cytokine and administration of the one or more additional therapeutic agents). Agents contemplated herein include, but are not limited to, a cytotoxic agent, a cytokine, an agent targeting an immune checkpoint molecule, an agent targeting an immune stimulatory molecule, a growth inhibitory agent, an immune stimulatory agent, an anti-inflammatory agent, or an anti-cancer agent.

[0633] The formulation herein may also contain more than one active compound as necessary for the particular indication being treated, preferably those with complementary activities that do not adversely affect each other. Alternatively, or in addition, the composition may comprise a cytotoxic agent, cytokine, agent targeting an immune checkpoint molecule or stimulatory molecule, growth inhibitory agent, an immune stimulatory agent, an anti-inflammatory agent, or an anti-cancer agent. Such molecules are suitably present in combination in amounts that are effective for the purpose intended.

[0634] The formulation may be presented in any suitable state, such as a liquid formulation, a solid state (lyophilized) formulation, or a frozen formulation. Approaches for preparing each of these types of formulations for therapeutic use are well known in the art.

### 8. METHODS OF TREATMENT

[0635] Provided herein are methods for treating or preventing a disease in a subject comprising administering to the subject an effective amount of any masked IL-2 cytokine described herein or compositions thereof. In some embodiments, methods are provided for treating or preventing a disease in a subject comprising administering to the subject any composition described herein. In some embodiments, the subject (e.g., a human patient) has been diagnosed with cancer or is at risk of developing such a disorder. In some embodiments, methods are provided for treating or preventing disease in a subject comprising administering to the subject an effective amount of any masked IL-2 cytokine described herein or compositions thereof, wherein the masked IL-2 cytokine is activated upon cleavage by an enzyme. In some embodiments, the masked IL-2 cytokine is activated at a tumor microenvironment. The masked IL-2 cytokine is therapeutically active after it has cleaved. Thus, in some embodiments, the active agent is the cleavage product.

[0636] For the prevention or treatment of disease, the appropriate dosage of an active agent will depend on the type of disease to be treated, as defined herein, the severity and course of the disease, whether the agent is administered for preventive or therapeutic purposes, previous therapy, the subject's clinical history and response to the agent, and the discretion of the attending physician. The agent is suitably administered to the subject at one time or over a series of treatments.

[0637] In some embodiments of the methods described herein, an interval between administrations of a masked IL-2 cytokine described herein is about one week or longer. In some embodiments of the methods described herein, an interval between administrations of a masked IL-2 cytokine described herein is about two days or longer, about three days or longer, about four days or longer, about five days or longer, or about six days or longer. In some embodiments of the methods described herein, an interval between administrations of a masked IL-2 cytokine described herein is about one week or longer, about two weeks or longer, about three weeks or longer, or about four weeks or longer. In some embodiments of the methods described herein, an interval between administrations of a masked IL-2 cytokine described herein is about one month or longer, about two months or longer, or about three months or longer. As used herein, an interval between administrations refers to the time period between one administration of the masked IL-2 cytokine and the next administration of the masked IL-2 cytokine. As used herein, an interval of about one month includes four weeks. In some embodiments, the treatment includes multiple administrations of the masked IL-2 cytokine, wherein the interval between administrations may vary. For example, in some embodiments, the interval between the first administration and the second administration is about one week, and the intervals between the subsequent administrations are about two weeks. In some embodiments, the interval between the first administration and the second administration is about two days, three days, four days, or five days, or six days, and the intervals between the subsequent administrations are about one week.

[0638] In some embodiments, the masked IL-2 cytokine is administered on multiple occasions over a period of time. The dosage that is administered to the subject on multiple occasions can, in some embodiments, be the same dosage for each administration, or, in some embodiments, the masked cytokine can be administered to the subject at two or more different dosages. For example, in some embodiments, a masked IL-2 cytokine is initially administered at one dosage on one or more occasions and is later administered at a second dosage on one or more occasions beginning at a later time point.

[0639] In some embodiments, a masked IL-2 polypeptide described herein is administered at a flat dose. In some embodiments, a masked IL-2 polypeptide described herein is administered to a subject at a dosage from about 25 mg to about 500 mg per dose. In some embodiments, the masked IL-2 polypeptide is administered to a subject at a dosage of about 25 mg to about 50 mg, about 50 mg to about 75 mg, about 75 mg to about 100 mg, about 100 mg to about 125 mg, about 125 mg to about 150 mg, about 150 mg to about 175 mg, about 175 mg to about 200 mg, about 200 mg to about 225 mg, about 225 mg to about 250 mg, about 250 mg to about 275 mg, about 275 mg to about 300 mg, about 300 mg to about 325 mg, about 325 mg to about 350 mg, about 350 mg to about 375 mg, about 375 mg to about 400 mg, about 400 mg to about 425 mg, about 425 mt to about 450 mg, about 450 mg, to about 475 mg, or about 475 mg to about 500 mg per dose.

[0640] In some embodiments, a masked IL-2 polypeptide described herein is administered to a subject at a dosage based on the subject's weight or body surface area (BSA). Depending on the type and severity of the disease, about 1 μg/kg to 15 mg/kg (e.g. 0.1 mg/kg-10 mg/kg) of masked IL-2 polypeptide can be an initial candidate dosage for administration to the patient, whether, for example, by one or more separate administrations, or by continuous infusion. One typical daily dosage might range from about 1 μg/kg to 100 mg/kg or more, depending on the factors mentioned above. For repeated administrations over several days or longer, depending on the condition, the treatment would generally be sustained until a desired suppression of disease symptoms occurs. One exemplary dosage of the masked IL-2 polypeptide would be in the range from about 0.05 mg/kg to about 10 mg/kg. Thus, one or more doses of about 0.5 mg/kg, 2.0 mg/kg, 4.0 mg/kg or 10 mg/kg (or any combination thereof) may be administered to the patient. In some embodiments, a masked IL-2 polypeptide described herein is administered to a subject at a dosage from about 0.1 mg/kg to about 10 mg/kg or about 1.0 mg/kg to about 10 mg/kg. In some embodiments, a masked IL-2 polypeptide described herein is administered to a subject at a dosage of about any of 0.1 mg/kg, 0.5 mg/kg, 1.0 mg/kg, 1.5 mg/kg, 2.0 mg/kg, 2.5 mg/kg, 3.0 mg/kg, 3.5 mg/kg, 4.0 mg/kg, 4.5 mg/kg, 5.0 mg/kg, 5.5 mg/kg, 6.0 mg/kg, 6.5 mg/kg, 7.0 mg/kg, 7.5 mg/kg, 8.0 mg/kg, 8.5 mg/kg, 9.0 mg/kg, 9.5 mg/kg, or 10.0 mg/kg. In some embodiments, a masked IL-2 polypeptide described herein is administered to a subject at a dosage of about or at least about 0.1 mg/kg, about or at least about 0.5 mg/kg, about or at least about 1.0 mg/kg, about or at least about 1.5 mg/kg, about or at least about 2.0 mg/kg, about or at least about 2.5 mg/kg, about or at least about 3.0 mg/kg, about or at least about 3.5 mg/kg, about or at least about 4.0 mg/kg, about or at least about 4.5 mg/kg, about or at least about 5.0 mg/kg, about or at least about 5.5 mg/kg, about or at least about 6.0 mg/kg, about or at least about 6.5 mg/kg, about or at least about 7.0 mg/kg, about or at least about 7.5 mg/kg, about or at least about 8.0 mg/kg, about or at least about 8.5 mg/kg, about or at least about 9.0 mg/kg, about or at least about 9.5 mg/kg, about or at least about 10.0 mg/kg, about or at least about 15.0 mg/kg, about or at least about 20 mg/kg, about or at least about 30 mg/kg, about or at least about 40 mg/kg, about or at least about 50 mg/kg, about or at least about 60 mg/kg, about or at least about 70 mg/kg, about or at least about 80 mg/kg, about or at least about 90 mg/kg, or about or at least about 100 mg/kg. Any of the dosing frequencies described above may be used.

[0641] A method of treatment contemplated herein is the treatment of a disorder or disease such as cancer with any of the masked IL-2 cytokines or compositions described herein. Disorders or diseases that are treatable with the formulations of this present invention include leukemia, lymphoma, head and neck cancer, colorectal cancer, prostate cancer, pancreatic cancer, melanoma, breast cancer, neuroblastoma, lung cancer, ovarian cancer, osteosarcoma, bladder cancer, cervical cancer, liver cancer, kidney cancer, skin cancer (e.g., Merkel cell carcinoma) or testicular cancer.

[0642] In some embodiments, provided herein is a method of treatment or prevention of a cancer by administration of any masked IL-2 cytokines or compositions described herein. In some embodiments, provided herein is a method of treatment or prevention of a cancer by administration of any IL-2 masked cytokine or composition described herein in combination with an anticancer agent. The anti-cancer agent can be any agent capable of reducing cancer growth, interfering with cancer cell replication, directly or indirectly killing cancer cells, reducing metastasis, reducing tumor blood supply, or reducing cell survival. In some embodiments, the anti-cancer agent is selected from the group consisting of a PD-1 inhibitor, an EGFR inhibitor, a HER2 inhibitor, a VEGFR inhibitor, a CTLA-4 inhibitor, a BTLA inhibitor, a B7H4 inhibitor, a B7H3 inhibitor, a CSFIR inhibitor, an HVEM inhibitor, a CD27 inhibitor, a KIR inhibitor, an NKG2A inhibitor, an NKG2D agonist, a TWEAK inhibitor, an ALK inhibitor, a CD52 targeting antibody, a CCR4 targeting antibody, a PD-L1 inhibitor, a KIT inhibitor, a PDGFR inhibitor, a BAFF inhibitor, an HD AC inhibitor, a VEGF ligand inhibitor, a CD19 targeting molecule, a FOFR1 targeting molecule, a DFF3 targeting molecule, a DKK1 targeting molecule, a MUC1 targeting molecule, a MUG 16 targeting molecule, a PSMA targeting molecule, an MSFN targeting molecule, an NY-ES0-1 targeting molecule, a B7H3 targeting molecule, a B7H4 targeting molecule, a BCMA targeting molecule, a CD29 targeting molecule, a CD151 targeting molecule, a CD 123 targeting molecule, a CD33 targeting molecule, a CD37 targeting molecule, a CDH19 targeting molecule, a CEA targeting molecule, a Claudin 18.2 targeting molecule, a CFEC12A targeting molecule, an EGFRVIII targeting molecule, an EPCAM targeting molecule, an EPHA2 targeting molecule, an FCRH5 targeting molecule, an FLT3 targeting molecule, a GD2 targeting molecule, a glypican 3 targeting molecule, a gpA33 targeting molecule, a GPRC5D targeting molecule, an IL-23R targeting molecule, an IL-1RAP targeting molecule, a MCSP targeting molecule, a RON targeting molecule, a ROR1 targeting molecule, a STEAP2 targeting molecule, a TfR targeting molecule, a CD166 targeting molecule, a TPBG targeting molecule, a TROP2 targeting molecule, a proteasome inhibitor, an ABE inhibitor, a CD30 inhibitor, a FLT3 inhibitor, a MET inhibitor, a RET inhibitor, an IL-1 (3 inhibitor, a MEK inhibitor, a ROS1 inhibitor, a BRAE inhibitor, a CD38 inhibitor, a RANKE inhibitor, a B4GALNT1 inhibitor, a SLAMF7 inhibitor, an IDH2 inhibitor, an mTOR inhibitor, a CD20 targeting antibody, a BTK inhibitor, a PI3K inhibitor, a FLT3 inhibitor, a PARP inhibitor, a CDK4 inhibitor, a CDK6 inhibitor, an EGFR inhibitor, a RAF inhibitor, a JAK1 inhibitor, a JAK2 inhibitor, a JAK3 inhibitor, an IL-6 inhibitor, a IL-17 inhibitor, a Smoothened inhibitor, an IL-6R inhibitor, a BCL2 inhibitor, a PTCH inhibitor, a PIGF inhibitor, a TGFB inhibitor, a CD28 agonist, a CD3 agonist, CD40 agonist, a GITR agonist, a 0X40 agonist, a VISTA agonist, a CD137 agonist, a LAG3 inhibitor, a TIM3 inhibitor, a TIGIT inhibitor, and an IL-2R inhibitor.

[0643] In some embodiments, provided herein is a method of treatment or prevention of a cancer by administration of any masked IL-2 cytokine described herein in combination with an anti-inflammatory agent. The anti-inflammatory agent can be any agent capable of preventing, counteracting, inhibiting, or otherwise reducing inflammation.

[0644] In some embodiments, the anti-inflammatory agent is a cyclooxygenase (COX) inhibitor. The COX inhibitor can be any agent that inhibits the activity of COX-1 and/or COX-2. In some embodiments, the COX inhibitor selectively inhibits COX-1 (i.e., the COX inhibitor inhibits the activity of COX-1 more than it inhibits the activity of COX-2). In some embodiments, the COX inhibitor selectively inhibits COX-2 (i.e., the COX inhibitor inhibits the activity of COX-2 more than it inhibits the activity of COX-1). In some embodiments, the COX inhibitor inhibits both COX-1 and COX-2.

[0645] In some embodiments, the COX inhibitor is a selective COX-1 inhibitor and is selected from the group consisting of SC-560, FR122047, P6, mofezolac, TFAP, flurbiprofen, and ketoprofen. In some embodiments, the COX inhibitor is a selective COX-2 inhibitor and is selected from the group consisting of celecoxib, rofecoxib, meloxicam, piroxicam, deracoxib, parecoxib, valdecoxib, etoricoxib, a chromene derivative, a chroman derivative, N-(2-cyclohexyloxynitrophenyl) methane sulfonamide, parecoxib, lumiracoxib, RS 57067, T-614, BMS-347070, JTE-522, 5-2474, SVT-2016, CT-3, ABT-963, SC-58125, nimesulide, flosulide, NS-398, L-745337, RWJ-63556, L-784512, darbufelone, CS-502, LAS-34475, LAS-34555, 5-33516, diclofenac, mefenamic acid, and SD-8381. In some embodiments, the COX inhibitor is selected from the group consisting of ibuprofen, naproxen, ketorolac, indomethacin, aspirin, naproxen, tolmetin, piroxicam, and meclofenamate. In some embodiments, the COX inhibitor is selected from the group consisting of SC-560, FR122047, P6, mofezolac, TFAP, flurbiprofen, ketoprofen, celecoxib, rofecoxib, meloxicam, piroxicam, deracoxib, parecoxib, valdecoxib, etoricoxib, a chromene derivative, a chroman derivative, N-(2-cyclohexyloxynitrophenyl) methane sulfonamide, parecoxib, lumiracoxib, RS 57067, T-614, BMS-347070, JTE-522, 5-2474, SVT-2016, CT-3, ABT-963, SC-58125, nimesulide, flosulide, NS-398, L-745337, RWJ-63556, L-784512, darbufelone, CS-502, LAS-34475, LAS-34555, S-33516, diclofenac, mefenamic acid, SD-8381, ibuprofen, naproxen, ketorolac, indomethacin, aspirin, naproxen, tolmetin, piroxicam, and meclofenamate.

[0646] In some embodiments, the anti-inflammatory agent is an NF-κB inhibitor. The NF-κB inhibitor can be any agent that inhibits the activity of the NF-κB pathway. In some embodiments, the NF-κB inhibitor is selected from the group consisting of an IKK complex inhibitor, an IκB degradation inhibitor, an NF-κB nuclear translocation inhibitor, a p65 acetylation inhibitor, an NF-κB DNA binding inhibitor, an NF-κB transactivation inhibitor, and a p53 induction inhibitor.

[0647] In some embodiments, the IKK complex inhibitor is selected from the group consisting of TPCA-1, NF-κB Activation Inhibitor VI (BOT-64), BMS-345541, amlexanox, SC-514 (GK-01140), IMD-0354, and IKK-16. In some embodiments, the IκB degradation inhibitor is selected from the group consisting of BAY-11-7082, MG-115, MG-132, lactacystin, epoxomicin, parthenolide, carfilzomib, and MLN-4924 (pevonedistat). In some embodiments, the NF-κB nuclear translocation inhibitor is selected from the group consisting of JSH-23 and rolipram. In some embodiments, the p65 acetylation inhibitor is selected from the group consisting of gallic acid and anacardic acid. In some embodiments, the NF-κB DNA binding inhibitor is selected from the group consisting of GYY-4137, p-XSC, CV-3988, and prostaglandin E2 (PGE2). In some embodiments, the NF-κB transactivation inhibitor is selected from the group consisting of LY-294002, wortmannin, and mesalamine. In some embodiments, the p53 induction inhibitor is selected from the group consisting of quinacrine and flavopiridol. In some embodiments, the NF-κB inhibitor is selected from the group consisting of TPCA-1, NF-κB Activation Inhibitor VI (BOT-64), BMS-345541, amlexanox, SC-514 (GK-01140), IMD-0354, IKK-16, BAY-11-7082, MG-115, MG-132, lactacystin, epoxomicin, parthenolide, carfilzomib, MLN-4924 (pevonedistat), JSH-23 rolipram, gallic acid, anacardic acid, GYY-4137, p-XSC, CV-3988, prostaglandin E2 (PGE2), LY-294002, wortmannin, mesalamine, quinacrine, and flavopiridol.

[0648] In some embodiments, provided herein is a method of treatment or prevention of a cancer by administration of any masked IL-2 cytokine or composition described herein in combination with an anticancer therapeutic protein. The anti-cancer therapeutic protein can be any therapeutic protein capable of reducing cancer growth, interfering with cancer cell replication, directly or indirectly killing cancer cells, reducing metastasis, reducing tumor blood supply, or reducing cell survival. Exemplary anti-cancer therapeutic proteins may come in the form of an antibody or fragment thereof, an antibody derivative, a bispecific antibody, a chimeric antigen receptor (CAR) T cell, a fusion protein, or a bispecific T-cell engager (BiTE). In some embodiments, provided herein is a method of treatment or prevention of a cancer by administration of any masked IL-2 cytokine or composition described herein in combination with CAR-NK (Natural Killer) cells.

### 9. ARTICLES OF MANUFACTURE OR KITS

[0649] In another aspect, an article of manufacture or kit is provided which comprises any masked IL-2 cytokine described herein. The article of manufacture or kit may further comprise instructions for use of the cytokines in the methods of the invention. Thus, in certain embodiments, the article of manufacture or kit comprises instructions for the use of a masked cytokine in methods for treating or preventing a disorder (e.g., a cancer) in an individual comprising administering to the individual an effective amount of a masked cytokine. For example, in certain embodiments, the article of manufacture or kit comprises instructions for the use of a masked IL-2 polypeptide in methods for treating or preventing a disorder (e.g., a cancer) in an individual comprising administering to the individual an effective amount of a masked IL-2 polypeptide. In certain embodiments, the individual is a human. In some embodiments, the individual has a disease selected from the group consisting of include leukemia, lymphoma, head and neck cancer, colorectal cancer, prostate cancer, pancreatic cancer, melanoma, breast cancer, neuroblastoma, lung cancer, ovarian cancer, osteosarcoma, bladder cancer, cervical cancer, liver cancer, kidney cancer, skin cancer or testicular cancer.

[0650] The article of manufacture or kit may further comprise a container. Suitable containers include, for example, bottles, vials (e.g., dual chamber vials), syringes (such as single or dual chamber syringes), test tubes, and intravenous (IV) bags. The container may be formed from a variety of materials such as glass or plastic.

[0651] The container holds the formulation. In some embodiments, the formulation is a lyophilized formulation. In some embodiments, the formulation is a frozen formulation. In some embodiments, the formulation is a liquid formulation.

[0652] The article of manufacture or kit may further comprise a label or a package insert, which is on or associated with the container, may indicate directions for reconstitution and/or use of the formulation. The label or package insert may further indicate that the formulation is useful or intended for subcutaneous, intravenous, or other modes of administration for treating or preventing a disorder (e.g., a cancer) in an individual. The container holding the formulation may be a single-use vial or a multi-use vial, which allows for repeat administrations of the reconstituted formulation. The article of manufacture or kit may further comprise a second container comprising a suitable diluent. The article of manufacture or kit may further include other materials desirable from a commercial, therapeutic, and user standpoint, including other buffers, diluents, filters, needles, syringes, and package inserts with instructions for use.

[0653] In a specific embodiment, the present invention provides kits for a single dose-administration unit. Such kits comprise a container of an aqueous formulation of therapeutic cytokine, including both single or multi-chambered pre-filled syringes. Exemplary pre-filled syringes are available from Vetter GmbH, Ravensburg, Germany.

[0654] The article of manufacture or kit herein optionally further comprises a container comprising a second medicament, wherein the masked cytokine is a first medicament, and which article or kit further comprises instructions on the label or package insert for treating the subject with the second medicament, in an effective amount.

[0655] In another embodiment, provided herein is an article of manufacture or kit comprising the formulations described herein for administration in an auto-injector device. An auto-injector can be described as an injection device that upon activation, will deliver its contents without additional necessary action from the patient or administrator. They are particularly suited for self-medication of therapeutic formulations when the delivery rate must be constant and the time of delivery is greater than a few moments.

### 10. DEFINITIONS

[0656] Unless defined otherwise, all terms of art, notations and other technical and scientific terms or terminology used herein are intended to have the same meaning as is commonly understood by one of ordinary skill in the art to which the claimed subject matter pertains. In some cases, terms with commonly understood meanings are defined herein for clarity and/or for ready reference, and the inclusion of such definitions herein should not necessarily be construed to represent a substantial difference over what is generally understood in the art.

[0657] It is to be understood that this invention is not limited to particular compositions or biological systems, which can, of course, vary. It is also to be understood that the terminology used herein is for the purpose of describing particular embodiments only, and is not intended to be limiting. As used in this specification and the appended claims, the singular forms “a,” “an,” and “the” include plural referents unless the content clearly dictates otherwise. Thus, for example, reference to “an IL-2 polypeptide” optionally includes a combination of two or more such polypeptides, and the like.

[0658] The term “about” as used herein refers to the usual error range for the respective value readily known to the skilled person in this technical field. Reference to “about” a value or parameter herein includes (and describes) embodiments that are directed to that value or parameter per se.

[0659] It is understood that aspects and embodiments of the invention described herein include “comprising,” “consisting,” and “consisting essentially of” aspects and embodiments.

[0660] As used herein, the term “and/or” refers to any one of the items, any combination of the items, or all of the items with which the term is associated. For instance, the phrase “A, B, and/or C” is intended to encompass each of the following embodiments: A, B, and C; A, B, or C; A or B; A or C; B or C; A and B; A and C; B and C; A and B or C; B and A or C; C and A or B; A (alone); B (alone); and C (alone).

[0661] The term “antibody” includes polyclonal antibodies, monoclonal antibodies (including full length antibodies which have an immunoglobulin Fc region), antibody compositions with polyepitopic specificity, multispecific antibodies (e.g., bispecific antibodies, diabodies, and single-chain molecules, as well as antibody fragments (e.g., Fab, F(ab′)2, and Fv). The term “immunoglobulin” (Ig) is used interchangeably with “antibody” herein.

[0662] The term “diabodies” refers to small antibody fragments with two antigen-binding sites, which comprise a heavy chain variable (VH) domain connected to a light chain variable (VL) domain in the same polypeptide chain (VH-VL).

[0663] The basic 4-chain antibody unit is a heterotetrameric glycoprotein composed of two identical light (L) chains and two identical heavy (H) chains. An IgM antibody consists of 5 of the basic heterotetramer units along with an additional polypeptide called a J chain, and contains 10 antigen binding sites, while IgA antibodies comprise from 2-5 of the basic 4-chain units which can polymerize to form polyvalent assemblages in combination with the J chain. In the case of IgGs, the 4-chain unit is generally about 150,000 daltons. Each L chain is linked to an H chain by one covalent disulfide bond, while the two H chains are linked to each other by one or more disulfide bonds depending on the H chain isotype. Each H and L chain also has regularly spaced intrachain disulfide bridges. Each H chain has at the N-terminus, a variable domain (VH) followed by three constant domains (CH) for each of the a and y chains and four CH domains for p and s isotypes. Each L chain has at the N-terminus, a variable domain (VL) followed by a constant domain at its other end. The VL is aligned with the VH and the CL is aligned with the first constant domain of the heavy chain (CHI). Particular amino acid residues are believed to form an interface between the light chain and heavy chain variable domains. The pairing of a VH and VL together forms a single antigen-binding site. For the structure and properties of the different classes of antibodies, see e.g., Basic and Clinical Immunology, 8th Edition, Daniel P. Sties, Abba I. Terr and Tristram G. Parsolw (eds), Appleton & Lange, Norwalk, Conn., 1994, page 71 and Chapter 6.

[0664] The L chain from any vertebrate species can be assigned to one of two clearly distinct types, called kappa and lambda, based on the amino acid sequences of their constant domains. Depending on the amino acid sequence of the constant domain of their heavy chains (CH), immunoglobulins can be assigned to different classes or isotypes. There are five classes of immunoglobulins: IgA, IgD, IgE, IgG and IgM, having heavy chains designated a, 8, e, y and p, respectively. The y and a classes are further divided into subclasses on the basis of relatively minor differences in the CH sequence and function, e.g., humans express the following subclasses: IgG1, IgG2, IgG3, IgG4, IgA1 and IgA2. IgG1 antibodies can exist in multiple polymorphic variants termed allotypes (reviewed in Jefferis and Lefranc 2009. mAbs Vol 1 Issue 4 1-7) any of which are suitable for use in the invention. Common allotypic variants in human populations are those designated by the letters a,f,n,z.

[0665] An “isolated” antibody is one that has been identified, separated and/or recovered from a component of its production environment (e.g., naturally or recombinantly). In some embodiments, the isolated polypeptide is free of association with all other components from its production environment. Contaminant components of its production environment, such as that resulting from recombinant transfected cells, are materials that would typically interfere with research, diagnostic or therapeutic uses for the antibody, and may include enzymes, hormones, and other proteinaceous or non-proteinaceous solutes. In some embodiments, the polypeptide is purified: (1) to greater than 95% by weight of antibody as determined by, for example, the Lowry method, and in some embodiments, to greater than 99% by weight; (1) to a degree sufficient to obtain at least 15 residues of N-terminal or internal amino acid sequence by use of a spinning cup sequenator, or (3) to homogeneity by SDS-PAGE under non-reducing or reducing conditions using Coomassie blue or silver stain. Isolated antibody includes the antibody in situ within recombinant cells since at least one component of the antibody's natural environment will not be present. Ordinarily, however, an isolated polypeptide or antibody is prepared by at least one purification step.

[0666] The term “monoclonal antibody” as used herein refers to an antibody obtained from a population of substantially homogeneous antibodies, i.e., the individual antibodies comprising the population are identical except for possible naturally occurring mutations and/or post-translation modifications (e.g., isomerizations, amidations) that may be present in minor amounts. In some embodiments, monoclonal antibodies have a C-terminal cleavage at the heavy chain and/or light chain. For example, 1, 2, 3, 4, or 5 amino acid residues are cleaved at the C-terminus of heavy chain and/or light chain. In some embodiments, the C-terminal cleavage removes a C-terminal lysine from the heavy chain. In some embodiments, monoclonal antibodies have an N-terminal cleavage at the heavy chain and/or light chain. For example, 1, 2, 3, 4, or 5 amino acid residues are cleaved at the N-terminus of heavy chain and/or light chain. In some embodiments truncated forms of monoclonal antibodies can be made by recombinant techniques. In some embodiments, monoclonal antibodies are highly specific, being directed against a single antigenic site. In some embodiments, monoclonal antibodies are highly specific, being directed against multiple antigenic sites (such as a bispecific antibody or a multispecific antibody). The modifier “monoclonal” indicates the character of the antibody as being obtained from a substantially homogeneous population of antibodies, and is not to be construed as requiring production of the antibody by any particular method. For example, the monoclonal antibodies to be used in accordance with the present invention may be made by a variety of techniques, including, for example, the hybridoma method, recombinant DNA methods, phage-display technologies, and technologies for producing human or human-like antibodies in animals that have parts or all of the human immunoglobulin loci or genes encoding human immunoglobulin sequences.

[0667] The terms “full-length antibody,” “intact antibody” or “whole antibody” are used interchangeably to refer to an antibody in its substantially intact form, as opposed to an antibody fragment. Specifically, whole antibodies include those with heavy and light chains including an Fc region. The constant domains may be native sequence constant domains (e.g., human native sequence constant domains) or amino acid sequence variants thereof. In some cases, the intact antibody may have one or more effector functions.

[0668] An “antibody fragment” comprises a portion of an intact antibody, such as the antigen binding region and/or the variable region of the intact antibody, and/or the constant region of the intact antibody. Examples of an antibody fragment include the Fc region of the antibody, a portion of the Fc region, or a portion of the antibody comprising the Fc region. Examples of antigen-binding antibody fragments include domain antibodies (dAbs), Fab, Fab′, F(ab′)2 and Fv fragments; diabodies; linear antibodies (see U.S. Pat. No. 5,641,870, Example 2; Zapata et ah, Protein Eng. 8(10): 1057-1062 [1995]); single-chain antibody molecules, and multispecific antibodies formed from antibody fragments. Single heavy chain antibodies or single light chain antibodies can be engineered, or in the case of the heavy chain, can be isolated from camelids, shark, libraries or mice engineered to produce single heavy chain molecules.

[0669] Papain digestion of antibodies produced two identical antigen-binding fragments, called “Fab” fragments, and a residual “Fc” fragment, a designation reflecting the ability to crystallize readily. The Fab fragment consists of an entire L chain along with the variable region domain of the H chain (VH), and the first constant domain of one heavy chain (CHI). Each Fab fragment is monovalent with respect to antigen binding, i.e., it has a single antigen-binding site. Pepsin treatment of an antibody yields a single large F(ab′)2 fragment which roughly corresponds to two disulfide linked Fab fragments having different antigen-binding activity and is still capable of cross-linking antigen. Fab′ fragments differ from Fab fragments by having a few additional residues at the carboxy terminus of the CHI domain including one or more cysteines from the antibody hinge region. Fab′-SH is the designation herein for Fab′ in which the cysteine residue(s) of the constant domains bear a free thiol group. F(ab′)2 antibody fragments originally were produced as pairs of Fab′ fragments which have hinge cysteines between them. Other chemical couplings of antibody fragments are also known. The Fc fragment comprises the carboxy-terminal portions of both H chains held together by disulfides. The effector functions of antibodies are determined by sequences and glycan in the Fc region, the region which is also recognized by Fc receptors (FcR) found on certain types of cells.

[0670] “Percent (%) amino acid sequence identity” with respect to a reference polypeptide sequence is defined as the percentage of amino acid residues in a candidate sequence that are identical with the amino acid residues in the reference polypeptide sequence, after aligning the sequences and introducing gaps, if necessary, to achieve the maximum percent sequence identity, and not considering any conservative subshtuyions as part of the sequence identity. Alignment for purposes of determining percent amino acid sequence identity can be achieved in various ways that are within the skill in the art, for instance, using publicly available computer software such as BLAST, BLAST-2, ALIGN or Megalign (DNASTAR) software. Those skilled in the art can determine appropriate parameters for aligning sequences, including any algorithms needed to achieve maximal alignment over the full length of the sequences being compared. For example, the % amino acid sequence identity of a given amino acid sequence A to, with, or against a given amino acid sequence B (which can alternatively be phrased as a given amino acid sequence A that has or comprises a certain % amino acid sequence identity to, with, or against a given amino acid sequence B) is calculated as follows:

100 times the fraction X/Y

[0671] where X is the number of amino acid residues scored as identical matches by the sequence in that program's alignment of A and B, and where Y is the total number of amino acid residues in B. It will be appreciated that where the length of amino acid sequence A is not equal to the length of amino acid sequence B, the % amino acid sequence identity of A to B will not equal the % amino acid sequence identity of B to A.

[0672] Antibody “effector functions” refer to those biological activities attributable to the Fc region (a native sequence Fc region or amino acid sequence variant Fc region) of an antibody, and vary with the antibody isotype. Examples of antibody effector functions include: C1q binding and complement dependent cytotoxicity; Fc receptor binding; antibody-dependent cell-mediated cytotoxicity (ADCC); phagocytosis; down regulation of cell surface receptors (e.g., B cell receptors); and B cell activation.

[0673] “Binding affinity” as used herein refers to the strength of the non-covalent interactions between a single binding site of a molecule (e.g., a cytokine) and its binding partner (e.g., a cytokine receptor). In some embodiments, the affinity of a binding protein (e.g., a cytokine) can generally be represented by a dissociation constant (Kd). Affinity can be measured by common methods known in the art, including those described herein.

[0674] An “isolated” nucleic acid molecule encoding the cytokine polypeptides described herein is a nucleic acid molecule that is identified and separated from at least one contaminant nucleic acid molecule with which it is ordinarily associated in the environment in which it was produced. In some embodiments, the isolated nucleic acid is free of association with all components associated with the production environment. The isolated nucleic acid molecules encoding the polypeptides and cytokine polypeptides herein is in a form other than in the form or setting in which it is found in nature. Isolated nucleic acid molecules therefore are distinguished from nucleic acid encoding the polypeptides and cytokine polypeptides herein existing naturally in cells.

[0675] The term “pharmaceutical formulation” refers to a preparation that is in such form as to permit the biological activity of the active ingredient to be effective, and that contains no additional components that are unacceptably toxic to a subject to which the formulation would be administered.

[0676] Such formulations are sterile.

[0677] “Carriers” as used herein include pharmaceutically acceptable carriers, excipients, or stabilizers that are nontoxic to the cell or mammal being exposed thereto at the dosages and concentrations employed. Often the physiologically acceptable carrier is an aqueous pH buffered solution. Examples of physiologically acceptable carriers include buffers such as phosphate, citrate, and other organic acids; antioxidants including ascorbic acid; low molecular weight (less than about 10 residues) polypeptide; proteins, such as serum albumin, gelatin, or immunoglobulins; hydrophilic polymers such as polyvinylpyrrolidone; amino acids such as glycine, glutamine, asparagine, arginine or lysine; monosaccharides, disaccharides, and other carbohydrates including glucose, mannose, or dextrins; chelating agents such as EDTA; sugar alcohols such as mannitol or sorbitol; salt-forming counterions such as sodium; and/or nonionic surfactants such as TWEEN™, polyethylene glycol (PEG), and PLURONICS™.

[0678] As used herein, the term “treatment” refers to clinical intervention designed to alter the natural course of the individual or cell being treated during the course of clinical pathology. Desirable effects of treatment include decreasing the rate of disease progression, ameliorating or palliating the disease state, and remission or improved prognosis. An individual is successfully “treated”, for example, if one or more symptoms associated with a disorder (e.g., a neoplastic disease) are mitigated or eliminated. For example, an individual is successfully “treated” if treatment results in increasing the quality of life of those suffering from a disease, decreasing the dose of other medications required for treating the disease, reducing the frequency of recurrence of the disease, lessening severity of the disease, delaying the development or progression of the disease, and/or prolonging survival of individuals.

[0679] As used herein, “in conjunction with” or “in combination with” refers to administration of one treatment modality in addition to another treatment modality. As such, “in conjunction with” or “in combination with” refers to administration of one treatment modality before, during or after administration of the other treatment modality to the individual.

[0680] As used herein, the term “prevention” includes providing prophylaxis with respect to occurrence or recurrence of a disease in an individual. An individual may be predisposed to, susceptible to a disorder, or at risk of developing a disorder, but has not yet been diagnosed with the disorder. In some embodiments, masked cytokines described herein are used to delay development of a disorder.

[0681] As used herein, an individual “at risk” of developing a disorder may or may not have detectable disease or symptoms of disease, and may or may not have displayed detectable disease or symptoms of disease prior to the treatment methods described herein. “At risk” denotes that an individual has one or more risk factors, which are measurable parameters that correlate with development of the disease, as known in the art. An individual having one or more of these risk factors has a higher probability of developing the disorder than an individual without one or more of these risk factors.

[0682] An “effective amount” refers to at least an amount effective, at dosages and for periods of time necessary, to achieve the desired or indicated effect, including a therapeutic or prophylactic result.

[0683] An effective amount can be provided in one or more administrations. A “therapeutically effective amount” is at least the minimum concentration required to effect a measurable improvement of a particular disorder. A therapeutically effective amount herein may vary according to factors such as the disease state, age, sex, and weight of the patient, and the ability of the antibody to elicit a desired response in the individual. A therapeutically effective amount may also be one in which any toxic or detrimental effects of the masked cytokine are outweighed by the therapeutically beneficial effects. A “prophylactically effective amount” refers to an amount effective, at the dosages and for periods of time necessary, to achieve the desired prophylactic result. Typically, but not necessarily, since a prophylactic dose is used in subjects prior to or at the earlier stage of disease, the prophylactically effective amount can be less than the therapeutically effective amount.

[0684] “Chronic” administration refers to administration of the medicament(s) in a continuous as opposed to acute mode, so as to main the initial therapeutic effect (activity) for an extended period of time. “Intermittent” administration is treatment that is not consecutively done without interruption, but rather is cyclic in nature.

[0685] As used herein, an “individual” or a “subject” is a mammal. A “mammal” for purposes of treatment includes humans, domestic and farm animals, and zoo, sports, or pet animals, such as dogs, horses, rabbits, cattle, pigs, hamsters, gerbils, mice, ferrets, rats, cats, etc. In some embodiments, the individual or subject is human.

### 11. EXAMPLES

[0686] The invention will be more fully understood by reference to the following examples. They should not, however, be construed as limiting the scope of the invention. It is understood that the examples and embodiments described herein are for illustrative purposes only and that various modifications or changes in light thereof will be suggested to persons skilled in the art and are to be included within the spirit and purview of this application and scope of the appended claims.

[0687] Although some examples describe the engineering, production, and/or testing of “masked” versions of an IL-2 polypeptide construct, some examples also employ parental “non-masked” versions of the IL-2 polypeptide construct, such as for comparison, or other constructs that include one or more of the components described herein that are tested as controls for comparison. Accordingly, the description of, for instance, testing done on masked IL-2 polypeptide constructs does not necessarily mean that non-masked versions of the construct were not also tested.

### Example 1: Engineering of Masked IL-2 Polypeptides

[0688] Masked IL-2 polypeptide constructs are generated in accordance with the teachings herein. In the subsequent examples, some experiments involve use of the masked IL-2 polypeptide constructs in monomer form, and some experiments involve use of the masked IL-2 constructs in dimer form, such as a dimer formed through disulfide bonds linking two copies of the same masked polypeptide construct (homodimer), or a heterodimer formed by two different polypeptides (see, e.g., Table 5).

[0689] Masked IL-2 polypeptide constructs are generated that include an IL-2 polypeptide or functional fragment thereof, a masking moiety, and a half-life extension domain, such as an antibody or fragment thereof (e.g., an Fc region, heavy chain, and/or light chain). Some IL-2 polypeptide constructs are also generated that include an IL-2 polypeptide or functional fragment thereof linked to a half-life extension domain without also including a masking moiety. Some of the constructs also include a linker that comprises a cleavable peptide and links the masking moiety to the IL-2 polypeptide or functional fragment thereof, thereby resulting in an activatable masked IL-2 polypeptide construct. Some of the constructs also include a linker that links the IL-2 polypeptide or functional fragment thereof to the half-life extension domain. Some of the constructs also include a linker that links the IL-2 polypeptide or functional fragment thereof to the masking moiety. The masked IL-2 polypeptide constructs that do not include a cleavable peptide in the linker that links the IL-2 polypeptide or functional fragment thereof to the masking moiety are also referred to as non-activatable masked IL-2 polypeptide constructs or non-activatable IL-2 polypeptide constructs because they do not include a cleavable peptide. The structure and composition of exemplary IL-2 polypeptide constructs are provided in Table 3.

TABLE 3

| | Cytokine or | | | | | Structure | |
|---|---|---|---|---|---|---|---|
| | functional | | Masking | | Half-life | (N- to | |
| Construct | fragment | Linker | moiety | Linker | extension | C-terminal | Amino Acid |
| # | thereof (C) | (L1) | (MM) | (L2) | domain (H) | direction) | Sequence |
| AK032 | SEQ ID | — | — | — | SEQ ID | H—C | SEQ ID |
| | NO: 62 | | | | NO: 65 | | NO: 67 |
| AK035 | SEQ ID | — | — | — | SEQ ID | H—C | SEQ ID |
| | NO: 3 | | | | NO: 65 | | NO: 68 |

[0690] Also generated are masked IL-2 polypeptide constructs that include an IL-2 polypeptide or functional fragment thereof, a first masking moiety, a second masking moiety, and a half-life extension domain, such as albumin, an antibody or fragment thereof (e.g., an Fc region, heavy chain, and/or light chain), an albumin-binding peptide, an IgG-binding peptide, or a polyamino acid sequence. Some of the constructs also include a linker that links the first masking moiety to the IL-2 polypeptide or functional fragment thereof. Some of the constructs also include a linker that links the second masking moiety to the IL-2 polypeptide or functional fragment thereof. Some of the constructs include a cleavable peptide in the linker linking the first masking moiety to the IL-2 polypeptide or functional fragment thereof and/or the linker linking the second masking moiety to the IL-2 polypeptide or functional fragment thereof, thereby resulting in an activatable masked IL-2 polypeptide construct. Some of the constructs also include a linker linking the second masking moiety to the half-life extension domain. The masked IL-2 polypeptide constructs that do not include a cleavable peptide in either of the linkers that link the IL-2 polypeptide or functional fragment thereof to the first masking moiety or the second masking moiety are also referred to as non-activatable masked IL-2 polypeptide constructs or non-activatable IL-2 polypeptide constructs because they do not include a cleavable peptide. The structure and composition of exemplary IL-2 polypeptide constructs are provided in Table 4.

TABLE 4

| | | | Cytokine or | | | | | Structure | |
|---|---|---|---|---|---|---|---|---|---|
| | Masking | | functional | | Masking | | Half-life | (N- to | |
| Construct | moiety | Linker | fragment | Linker | moiety | Linker | extension | C-terminal | Amino Acid |
| # | (MM1) | (L1) | thereof (C) | (L2) | (MM2) | (L3) | moiety (H) | direction) | Sequence |
| AK041 | SEQ ID | SEQ ID | SEQ ID | SEQ ID | SEQ ID | SEQ ID | SEQ ID | H-LI-MM1-L2- | SEQ ID |
| | NO: 60 | NO: 61 | NO: 62 | NO: 63 | NO: 64 | NO: 17 | NO: 65 | C-L3-MM2 | NO: 66 |

[0691] Also generated are masked IL-2 polypeptide constructs that include an IL-2 polypeptide or functional fragment thereof, a masking moiety, a first half-life extension domain, and a second half-life extension domain, an antibody or fragment thereof (e.g., an Fc region, heavy chain, and/or light chain). The masking moiety is linked to the first half-life extension domain, the IL-2 polypeptide or functional fragment thereof is linked to the second half-life extension domain, and the first half-life extension domain and the second half-life extension domain contain modifications promoting the association of the first and the second half-life extension domain. In one exemplary embodiment, the masking moiety is linked to the first half-life extension domain and includes the amino acid sequence of SEQ ID NO: 38, and the IL-2 polypeptide or functional fragment thereof is linked to the second half-life extension domain and includes the amino acid sequence of SEQ ID NO: 48, and the first half-life extension domain and the second half-life extension domain contain modifications promoting the association of the first and the second half-life extension domain. In one exemplary embodiment of a non-masked IL-2 polypeptide construct, the embodiment comprises an IL-2 polypeptide or functional fragment thereof linked to a first half-life extension domain, and comprises a second half-life extension domain, where the IL-2 polypeptide or functional fragment thereof is linked to the first half-life extension domain and includes the amino acid sequence of SEQ ID NO: 48, and the second half-life extension domain includes the amino acid sequence of SEQ ID NO: 79. Some of the constructs also include a linker that links the masking moiety to the first half-life extension domain, and/or a linker that links the IL-2 polypeptide or functional fragment thereof to the second half-life extension domain. The first and second half-life extension domain of some of the constructs are also linked. In some constructs, the first and second half-life extension domain of some of the constructs are linked by a linker. Some of the constructs include a cleavable peptide in the linker linking the masking moiety to the first half-life extension domain and/or the linker linking the IL-2 polypeptide or functional fragment thereof to the second half-life extension domain, thereby resulting in an activatable masked IL-2 polypeptide construct. The masked IL-2 polypeptide constructs that do not include a cleavable peptide in either the linker that links the IL-2 polypeptide or functional fragment thereof to the second half-life extension domain or the linker that links the masking moiety to the first half-life extension domain are also referred to as non-activatable masked IL-2 polypeptide constructs or non-activatable IL-2 polypeptide constructs because they do not include a cleavable peptide. The structure and composition of exemplary IL-2 polypeptide constructs are provided in Table 5.

TABLE 5

| | Cytokine or | | | | | Structure | |
|---|---|---|---|---|---|---|---|
| | functional | | Masking | | Half-life | (N- to | |
| Construct | fragment | Linker | moiety | Linker | extension | C-terminal | Amino Acid |
| # | thereof (C) | (L1) | (MM) | (L2) | moiety (H) | direction) | Sequence |
| AK081 | SEQ ID NO: 62 | SEQ ID NO: 18 | — | — | SEQ ID NO: 12 | H-L1-C | SEQ ID NO: 85 |
| | — | — | — | — | SEQ ID NO: 79 | H | SEQ ID NO: 79 |
| AK109 | — | SEQ ID NO: 17 | SEQ ID NO: 4 | — | SEQ ID NO: 80 | H-LI-MM | SEQ ID NO: 86 |
| | SEQ ID NO: 62 | — | — | — | SEQ ID NO: 81 | H—C | SEQ ID NO: 87 |
| AK110 | — | SEQ ID NO: 17 | SEQ ID NO: 4 | — | SEQ ID NO: 82 | H-LI-MM | SEQ ID NO: 88 |
| | SEQ ID NO: 62 | — | — | — | SEQ ID NO: 83 | H—C | SEQ ID NO: 89 |
| AK111 | SEQ ID NO: 62 | SEQ ID NO: 18 | — | — | SEQ ID NO: 12 | H-L1-C | SEQ ID NO: 85 |
| | — | SEQ ID NO: 14 | SEQ ID NO: 4 | — | SEQ ID NO: 9 | H-L1-MM | SEQ ID NO: 38 |
| AK165 | SEQ ID NO: 62 | SEQ ID NO: 18 | — | — | SEQ ID NO: 83 | H-L1-C | SEQ ID NO: 90 |
| | — | — | — | — | SEQ ID NO: 84 | H | SEQ ID NO: 91 |
| AK166 | SEQ ID NO: 62 | SEQ ID NO: 18 | — | — | SEQ ID NO: 83 | H-L1-C | SEQ ID NO: 90 |
| | — | SEQ ID NO: 75 | SEQ ID NO: 4 | — | SEQ ID NO: 82 | H-L1-MM | SEQ ID NO: 92 |
| AK167 | SEQ ID NO: 3 | SEQ ID NO: 18 | — | — | SEQ ID NO: 12 | H-L1-C | SEQ ID NO: 45 |
| | — | — | — | — | SEQ ID NO: 79 | H | SEQ ID NO: 79 |
| AK168 | SEQ ID NO: 3 | SEQ ID NO: 18 | — | — | SEQ ID NO: 12 | H-L1-C | SEQ ID NO: 45 |
| | — | SEQ ID NO: 14 | SEQ ID NO: 4 | — | SEQ ID NO: 9 | H-L1-MM | SEQ ID NO: 38 |
| AK189 | SEQ ID NO: 62 | SEQ ID NO: 76 | — | — | SEQ ID NO: 12 | H-L1-C | SEQ ID NO: 93 |
| | — | SEQ ID NO: 14 | SEQ ID NO: 4 | — | SEQ ID NO: 9 | H-L1-MM | SEQ ID NO: 38 |
| AK190 | SEQ ID NO: 62 | SEQ ID NO: 77 | — | — | SEQ ID NO: 12 | H-L1-C | SEQ ID NO: 94 |
| | — | SEQ ID NO: 14 | SEQ ID NO: 4 | — | SEQ ID NO: 9 | H-L1-MM | SEQ ID NO: 38 |
| AK191 | SEQ ID NO: 3 | SEQ ID NO: 20 | — | — | SEQ ID NO: 12 | H-L1-C | SEQ ID NO: 46 |
| | — | SEQ ID NO: 14 | SEQ ID NO: 4 | — | SEQ ID NO: 9 | H-L1-MM | SEQ ID NO: 38 |
| AK192 | SEQ ID NO: 3 | SEQ ID NO: 76 | — | — | SEQ ID NO: 12 | H-L1-C | SEQ ID NO: 95 |
| | — | SEQ ID NO: 14 | SEQ ID NO: 4 | — | SEQ ID NO: 9 | H-L1-MM | SEQ ID NO: 38 |
| AK193 | SEQ ID NO: 3 | SEQ ID NO: 77 | — | — | SEQ ID NO: 12 | H-L1-C | SEQ ID NO: 96 |
| | — | SEQ ID NO: 14 | SEQ ID NO: 4 | — | SEQ ID NO: 9 | H-L1-MM | SEQ ID NO: 38 |
| AK197 | SEQ ID NO: 3 | SEQ ID NO: 21 | — | — | SEQ ID NO: 12 | H-L1-C | SEQ ID NO: 47 |
| | — | SEQ ID NO: 14 | SEQ ID NO: 4 | — | SEQ ID NO: 9 | H-L1-MM | SEQ ID NO: 38 |
| AK203 | SEQ ID NO: 3 | SEQ ID NO: 22 | — | — | SEQ ID NO: 12 | H-L1-C | SEQ ID NO: 48 |
| | — | SEQ ID NO: 14 | SEQ ID NO: 4 | — | SEQ ID NO: 9 | H-L1-MM | SEQ ID NO: 38 |
| AK209 | SEQ ID NO: 3 | SEQ ID NO: 78 | — | — | SEQ ID NO: 12 | H-L1-C | SEQ ID NO: 49 |
| | — | SEQ ID NO: 14 | SEQ ID NO: 4 | — | SEQ ID NO: 9 | H-L1-MM | SEQ ID NO: 38 |
| AK210 | SEQ ID NO: 62 | SEQ ID NO: 20 | — | — | SEQ ID NO: 12 | H-L1-C | SEQ ID NO: 97 |
| | — | SEQ ID NO: 14 | SEQ ID NO: 4 | — | SEQ ID NO: 9 | H-L1-MM | SEQ ID NO: 38 |
| AK211 | SEQ ID NO: 3 | SEQ ID NO: 23 | — | — | SEQ ID NO: 12 | H-L1-C | SEQ ID NO: 98 |
| | — | SEQ ID NO: 14 | SEQ ID NO: 4 | — | SEQ ID NO: 9 | H-L1-MM | SEQ ID NO: 38 |
| AK215 | SEQ ID NO: 69 | SEQ ID NO: 18 | — | — | SEQ ID NO: 12 | H-L1-C | SEQ ID NO: 99 |
| | — | SEQ ID NO: 14 | SEQ ID NO: 4 | — | SEQ ID NO: 9 | H-L1-MM | SEQ ID NO: 38 |
| AK216 | SEQ ID NO: 70 | SEQ ID NO: 18 | — | — | SEQ ID NO: 12 | H-L1-C | SEQ ID NO: 100 |
| | — | SEQ ID NO: 14 | SEQ ID NO: 4 | — | SEQ ID NO: 9 | H-L1-MM | SEQ ID NO: 38 |
| AK218 | SEQ ID NO: 71 | SEQ ID NO: 18 | — | — | SEQ ID NO: 12 | H-L1-C | SEQ ID NO: 101 |
| | — | SEQ ID NO: 14 | SEQ ID NO: 4 | — | SEQ ID NO: 9 | H-L1-MM | SEQ ID NO: 38 |
| AK219 | SEQ ID NO: 72 | SEQ ID NO: 18 | — | — | SEQ ID NO: 12 | H-L1-C | SEQ ID NO: 102 |
| | — | SEQ ID NO: 14 | SEQ ID NO: 4 | — | SEQ ID NO: 9 | H-L1-MM | SEQ ID NO: 38 |
| AK220 | SEQ ID NO: 873 | SEQ ID NO: 18 | — | — | SEQ ID NO: 12 | H-L1-C | SEQ ID NO: 103 |
| | — | SEQ ID NO: 14 | SEQ ID NO: 4 | — | SEQ ID NO: 9 | H-L1-MM | SEQ ID NO: 38 |
| AK223 | SEQ ID NO: 74 | SEQ ID NO: 18 | — | — | SEQ ID NO: 12 | H-L1-C | SEQ ID NO: 104 |
| | — | SEQ ID NO: 14 | SEQ ID NO: 4 | — | SEQ ID NO: 9 | H-L1-MM | SEQ ID NO: 38 |
| AK235 | SEQ ID NO: 3 | SEQ ID NO: 78 | — | — | SEQ ID NO: 12 | H-L1-C | SEQ ID NO: 49 |
| | — | — | — | — | SEQ ID NO: 79 | H | SEQ ID NO: 79 |
| AK253 | SEQ ID NO: 3 | SEQ ID NO: 23 | — | — | SEQ ID NO: 12 | H-L1-C | SEQ ID NO: 98 |
| | — | — | — | — | SEQ ID NO: 79 | H | SEQ ID NO: 79 |
| AK304 | SEQ ID NO: 69 | SEQ ID NO: 78 | — | — | SEQ ID NO: 12 | H-L1-C | SEQ ID NO: 105 |
| | — | — | — | — | SEQ ID NO: 9 | H | SEQ ID NO: 70 |
| AK305 | SEQ ID NO: 69 | SEQ ID NO: 78 | — | — | SEQ ID NO: 12 | H-L1-C | SEQ ID NO: 105 |
| | — | SEQ ID NO: 14 | SEQ ID NO: 4 | — | SEQ ID NO: 9 | H-L1-MM | SEQ ID NO: 38 |
| AK306 | SEQ ID NO: 70 | SEQ ID NO: 78 | — | — | SEQ ID NO: 12 | H-L1-C | SEQ ID NO: 106 |
| | — | — | — | — | SEQ ID NO: 79 | H | SEQ ID NO: 79 |
| AK307 | SEQ ID NO: 70 | SEQ ID NO: 78 | — | — | SEQ ID NO: 12 | H-L1-C | SEQ ID NO: 106 |
| | — | SEQ ID NO: 14 | SEQ ID NO: 4 | — | SEQ ID NO: 9 | H-L1-MM | SEQ ID NO: 38 |
| AK308 | SEQ ID NO: 71 | SEQ ID NO: 78 | — | — | SEQ ID NO: 12 | H-L1-C | SEQ ID NO: 107 |
| | — | — | — | — | SEQ ID NO: 79 | H | SEQ ID NO: 79 |
| AK309 | SEQ ID NO: 71 | SEQ ID NO: 78 | — | — | SEQ ID NO: 12 | H-L1-C | SEQ ID NO: 107 |
| | — | SEQ ID NO: 14 | SEQ ID NO: 4 | — | SEQ ID NO: 9 | H-L1-MM | SEQ ID NO: 38 |
| AK310 | SEQ ID NO: 72 | SEQ ID NO: 78 | — | — | SEQ ID NO: 12 | H-L1-C | SEQ ID NO: 108 |
| | — | — | — | — | SEQ ID NO: 79 | H | SEQ ID NO: 79 |
| AK311 | SEQ ID NO: 72 | SEQ ID NO: 78 | — | — | SEQ ID NO: 12 | H-L1-C | SEQ ID NO: 108 |
| | — | SEQ ID NO: 14 | SEQ ID NO: 4 | — | SEQ ID NO: 9 | H-L1-MM | SEQ ID NO: 38 |
| AK312 | SEQ ID NO: 73 | SEQ ID NO: 78 | — | — | — | H-L1-C | SEQ ID NO: 109 |
| | — | — | — | — | — | H | SEQ ID NO: 79 |
| AK313 | SEQ ID NO: 73 | SEQ ID NO: 78 | — | — | SEQ ID NO: 13 | H-L1-C | SEQ ID NO: 109 |
| | — | SEQ ID NO: 14 | SEQ ID NO: 4 | — | SEQ ID NO: 9 | H-L1-MM | SEQ ID NO: 38 |
| AK314 | SEQ ID NO: 74 | SEQ ID NO: 78 | — | — | SEQ ID NG: 12 | H-L1-C | SEQ ID NO: 110 |
| | — | — | — | — | SEQ ID NO: 9 | H | SEQ ID NO: 79 |
| AK315 | SEQ ID NO: 74 | SEQ ID NO: 78 | — | — | SEQ ID NO: 12 | H-L1-C | SEQ ID NO: 110 |
| | — | SEQ ID NO: 14 | SEQ ID NO: 4 | — | SEQ ID NO: 9 | H-L1-MM | SEQ ID NO: 38 |
| AK316 | SEQ ID NO: 62 | SEQ ID NO: 78 | — | — | SEQ ID NO: 12 | H-L1-C | SEQ ID NO: 112 |
| | — | SEQ ID NO: 14 | SEQ ID NO: 4 | — | SEQ ID NO: 9 | H-L1-MM | SEQ ID NO: 38 |

### Example 2: In Vitro Characterization of Masked IL-2 Polypeptides

[0692] The masked IL-2 polypeptide constructs generated in Example 1 are characterized using several cellular and functional assays in vitro.

[0693] Production

[0694] Plasmids encoding the constructs (e.g., masked IL-2 polypeptide constructs) were transfected into either Expi293 cells (Life Technologies A14527) or HEK293-6E cells (National Research Council; NRC). Transfections were performed using 1 mg of total DNA using PEIpro (Polyplus Transfection, 115-100) in a 1:1 ratio with the total DNA. The DNA and PEI were each added to 50 mL of OptiMem (Life Technologies 31985088) medium and sterile filtered. The DNA and PEI were combined for 10 minutes and added to the Expi293 cells with a cell density of 1.8-2.8×10⁶ cells/mL or 0.85-1.20×10⁶ cells/m, for expi293 cells or HEK293 cells, respectively, and a viability of at least 95%. The HEK293-6E transfection was performed with a cell density of and a viability of at least 95%, following the same protocol used for the Expi293 transfections. After 5-7 days, the cells were pelleted by centrifugation at 3000×g and the supernatant was filtered through a 0.2 μm membrane. Protein A resin (CaptivA, Repligen CA-PRI-0005) was added to the filtered supernatant and incubated for at least 2 hours at 4° C. with shaking. The resin was packed into a column, washed with 15 column volumes of 20 mM citrate, pH 6.5, and then washed with 15 column volumes of 20 mM citrate, 500 mM sodium chloride, pH 6.5. The bound protein was eluted from the column with 20 mM citrate, 100 mM NaCl, pH 2.9.

[0695] The titer (mg/L) of exemplary constructs produced, including parental (e.g., non-masked) and masked constructs, is provided in Table 6, below.

TABLE 6

| Construct | Titer |
|---|---|
| ID | (mg/L) |
| AK032 | 5.8 |
| AK035 | 16.7 |
| AK081 | 23.5 |
| AK111 | 12.7 |
| AK165 | 13.5 |
| AK166 | 17.1 |
| AK167 | 56.4 |
| AK168 | 36.1 |
| AK203 | 83.2 |
| AK209 | 27.3 |
| AK211 | 43.8 |
| AK235 | 35.9 |
| AK253 | 41.4 |
| AK304 | 19.9 |
| AK305 | 53.2 |
| AK306 | 29.3 |
| AK307 | 62.9 |
| AK314 | 60 |
| AK315 | 59.8 |
| AK316 | 69.2 |
| AK308 | 74.5 |
| AK309 | 90.8 |
| AK310 | 44 |
| AK311 | 64.9 |
| AK312 | 154 |
| AK313 | 81.2 |

[0696] SDS-PAGE Analysis

[0697] For SDS-PAGE analysis, protein samples were made with 4× Laemmli sample buffer (BioRad Catalog Number 1610747). For the reduced samples, 0.1 M Bond Breaker TCEP Solution (Thermo Scientific 77720) was added and the samples were heated for 5 minutes at 65° C. The proteins were loaded into a 12-well NuPage 4-12% Bis-Tris Protein Gel (Invitrogen NP0322BOX), with 4 μg of protein loaded per well. The gel was stained using SimplyBlue SafeStain (Invitrogen LC6065).

[0698] As depicted in FIG. 4, SDS-PAGE analysis was performed on the flow-through (FT) samples (i.e., proteins that did not bind to the Protein A column) and the eluted (E) samples (i.e., proteins that bound to the Protein A column and were eluted from it) following production and purification of exemplary constructs (AK304, AK305, AK307, AK308, AK309, AK310, AK311, AK312, AK313, AK314, and AK315). This exemplary data demonstrates that constructs as described herein can be successfully produced and purified.

[0699] Reporter Bioassays

[0700] Reporter bioassays are performed on masked IL-2 polypeptide constructs, along with non-masked parental constructs or other controls, to monitor activation of a downstream pathway, such as the JAK-STAT pathway.

[0701] In some studies, HEK-Blue IL-2 reporter cells (Invivogen) were used to test activation of the JAK-STAT pathway in accordance with the following method. HEK-Blue IL-2 cells passage 6 (p6) (97% live) were washed 2× with assay medium (DMEM+10% heat-inactivated FBS), plated in 3 plated at 5e4 cells/well in 150 uL of assay medium, and rested in assay medium for about 2 hours to allow adherence to plate. Each construct tested was diluted to 300 pM in assay medium, then diluted 1:2 down the plate. 50 uL of each dilution was added, for a final starting concentration of 75 pM. HEK-Blue IL-2 cell supernatant was harvested after 24 hours, an incubated with Quantiblue (180 uL+20 uL supernatant), plus 3 wells/plate of assay medium, at 37 deg C. for 1 hour. The absorbance was read using a Biotek Neo2 at 625 nm.

[0702] In some studies, CTLL2 cells were used to test activation of the JAK-STAT pathway in accordance with the following method. CTLL2 cells were plated at 40,000 cell per well in RPMI with 10% FBS. Dilutions of the constructs of interest were added and incubated at 37 degrees. After 6 hours, the Bio-Glo reagent was added and luminescence measured with a BioTek Synergy Neo2 plate reader.

[0703] Receptor Binding

[0704] The binding of the masked IL-2 polypeptide constructs generated in Example 1 is assessed. ELISA plates are coated with a receptor subunit, such as IL-2Rα (also referred to as CD25), IL-2Rβ (also referred to as CD122), or IL-2Rγ (also referred to as CD132), or combinations thereof. Dilutions of masked IL-2 polypeptide constructs are allowed to bind to the receptor subunit(s) and are detected using an anti-huFc-HRP detection antibody. The binding of the masked IL-2 polypeptide constructs is determined in conditions with and without protease cleavage.

[0705] On-Cell Receptor Binding

[0706] The on-cell receptor binding of the masked IL-2 polypeptide constructs generated in Example 1 is assessed. Dilutions of masked IL-2 polypeptide constructs are allowed to bind to peripheral blood lymphocytes or tissue culture cells, such as CTLL2 cells and are detected by fluorescence activated cell sorting (FACS) using an anti-huFc-FITC or anti-albumin-FITC detection antibody. The binding of the masked IL-2 polypeptide constructs is determined in conditions with and without protease cleavage.

[0707] Receptor Binding Affinity

[0708] The binding affinity of the masked IL-2 polypeptide constructs generated in Example 1 is assessed. The binding affinity of the masked IL-2 polypeptide constructs is determined in conditions with and without protease cleavage.

[0709] For SPR studies testing binding of masked and non-masked IL-2 polypeptide constructs, Reichert Carboxymethyl Dextran Hydrogel Surface Sensor Chips were coated and immobilized with the construct of interest (e.g., a masked IL-2 polypeptide construct or non-masked IL-2 polypeptide construct) at 30 ug/ml in 10 mM Sodium Acetate, pH 5.0 via amine coupling with EDC and NHS. Dilutions of CD25-Fc or Fc-CD122 in PBST (CD25: 16 nM, 8 nM, 4 nM, 2 nM, 1 nM and CD122: 500 nM, 250 nM, 125 nM, 62.5 nM, 31.25 nM) were prepared. Using a Reichert 4Channel SPR, dilutions of CD25 or CD122 were flowed over the clips with the immobilized construct to determine the on rate at 25 degrees C. At equilibrium (approximately 3 minutes), the flow buffer was changed to PBST, to determine the off rates over 6 minutes. Between each run the chip was regenerated with 10 mM glycine, pH 2.0.

[0710] FIGS. 5A-5D depicts the efficacy of mutations on IL-2 which prevent binding to its alpha-receptor, using SPR analysis that tested the binding of an exemplary masked IL-2 polypeptide construct (AK168) to CD25-Fc. FIG. 5A depicts the interaction between AK168 and CD25-Fc, FIG. 5B depicts the interaction between AK168 activated with MMP and CD25-Fc, and FIG. 5C depicts the interaction between a recombinant human IL-2 (rhIL-2) control and CD25-Fc. FIG. 5D provides a table summarizing the data obtained for the association constant (ka), dissociation constant (kd), equilibrium dissociation constant (KD), as well as the Chi² value and U-value for each interaction. These results demonstrate that this exemplary masked IL-2 polypeptide construct (AK168) did not demonstrate detectable binding to CD25-Fc, while the wild-type rhIL-2 control did demonstrate detectable binding.

[0711] FIGS. 6A-6D depicts the masking of IL-2 towards its beta-receptor as well as restoration of binding post activation with protease, using SPR analysis that tested the binding of an exemplary masked IL-2 polypeptide construct (AK111) to CD122-Fc. FIG. 6A depicts the interaction between AK111 and CD122-Fc, FIG. 6B depicts the interaction between AK111 activated with MMP and CD122-Fc, and FIG. 6C depicts the interaction between a recombinant human IL-2 (rhIL-2) control and CD122-Fc. FIG. 6D provides a table summarizing the data obtained for the association constant (ka), dissociation constant (kd), equilibrium dissociation constant (KD), as well as the Chi² value and U-value for each interaction. These results demonstrate that this exemplary masked IL-2 polypeptide construct (AK111) did not demonstrate detectable binding to CD122-Fc unless it has been activated with protease, while the rhIL-2 control did demonstrate detectable binding. Additional exemplary SPR data is provided below in Table 7 for various constructs tested, including masked and non-masked constructs. For some structures, when applicable, the KD was determined for the construct with or without having been previously cleaved by a protease.

TABLE 7

| | KD for CD25 | KD for CD122 | KD for CD122 |
|---|---|---|---|
| | (without | (without | (after protease |
| Construct | protease cleavage) | protease cleavage) | cleavage) |
| rhIL2 | 0.878 nM | 124 nM | N/A |
| AK032 | 1.76 nM | 260 nM | N/A |
| AK035 | No binding detected | 110 nM | N/A |
| AK081 | 0.875 nM | 347 nM | N/A |
| AK109 | 1.67 nM | No binding detected | 118 nM |
| AK110 | 0.911 nM | No binding detected | 195 nM |
| AK111 | 0.4 nM | No binding detected | 235 nM |
| AK168 | No binding detected | Not determined | 175 nM |
| AK215 | No binding detected | | |
| AK216 | No binding detected | | |
| AK218 | Weak binding | | |
| AK219 | Weak binding | | |
| AK220 | Weak or no binding | | |
| | detected | | |
| AK223 | No binding detected | | |

[0712] Cleavage

[0713] The cleavage rate of the masked IL-2 polypeptide constructs is assessed by conducting receptor-binding assays, as described above, after incubation of the masked IL-2 peptide constructs in the presence or absence of a protease, and with the protease, if any, inactivated at various time points, such as by the addition of EDTA. The cleavage rate is also assessed using reducing and non-reducing polyacrylamide gel electrophoresis (PAGE) and by mass spectrometry whole mass and peptide map analyses. The cleavage rate is also assessed using an ex vivo assay in which the masked IL-2 polypeptide constructs are exposed to human, mouse, or cynomolgus monkey peripheral blood lymphocytes, or normal human tissue or human tumor tissue.

[0714] For some protease activation studies, MMP10 was diluted to 50 ng/uL in MMP cleavage buffer and activated with 1 mM APMA for 2 h at 37° C. 5 μL of protease (250 ng total) of the activated protease was incubated with 1 uM of masked cytokine constructs and incubated at 37 degrees for 2 hours. Cleavage was assessed by SDS-PAGE using AnykD™ Criterion™ TGX Stain-Free™ Protein Gels. A similar approach is taken to test cleavage by other proteases.

[0715] FIG. 7A depicts an exemplary structure of a masked IL-2 polypeptide prior to (left) and after (right) cleavage by a protease, such as a protease associated with the tumor environment. FIG. 7B depicts SDS-PAGE analysis of an exemplary masked IL-2 polypeptide construct that was incubated in the absence (left lane) or presence (right lane) of the MMP10 protease.

[0716] Proliferation

[0717] Proliferation of IL-2 responsive tissue culture cell lines, such as CTLL2, YT, TF1B, LGL, HH, and CT6, following treatment with the masked IL-2 polypeptide constructs generated in Example 1 is assessed. For experiments involving the masked IL-2 polypeptide constructs, cells are plated in 96 well tissue culture plates in media lacking IL-2 for 2-4 hours and then treated with the masked IL-2 polypeptide constructs at various concentrations. After incubation at 37 degrees for 24-48 hours, the cell number is determined by the addition of MTS, alamar blue, luciferase, or a similar metabolic detection reagent, and the colorimetric, fluorescent or luciferase readout detected by a plate spectrophotometer reader.

[0718] The proliferation of immune cells following treatment with the masked IL-2 polypeptide constructs generated in Example 1 is also assessed. Human, mouse, or cynomolgus peripheral blood mononuclear cells (PBMCs) are treated with the constructs at various concentrations, and the proliferation of cell types, such as Natural Killer (NK) cells, CD8+ T cells, CD4+ T cells, and/or Treg cells, is determined by staining for the particular cell type and analysis via fluorescence activated cell sorting (FACS). In some experiments, some PBMCs are treated with controls for comparison. In some experiments, some PBMCs are treated with aldesleukin as a control for the masked IL-2 polypeptide treatment. In some experiments, the NK cells are stained as CD45+CD3− CD56+, the CD8+ T cells are stained as CD45+CD3+CD8+, the CD4+T cells are stained as CD45+CD3+CD4+CD25−, and the Treg cells are stained as CD45+CD3+CD4+CD25+ FOXP3+. In some experiments, the PBMCs are treated for a period of five days. In some experiments, the PBMCs are also stained with Ki67, a marker of cell proliferation. In some experiments, the PBMCs are labeled with CFSE (Sigma-Aldrich) prior to treatment and proliferation is measured by 5 determining the extent of CFSE dilution. In some experiments, each construct, as well as aldesleukin and/or other controls, is administered at one or more concentrations, such as one or more concentrations ranging from 0.0001 nM to 500 nM.

[0719] STAT5 Activation

[0720] The activation of Signal Transducer and Activator of Transcription 5 (STAT5) following treatment with the masked IL-2 polypeptide constructs generated in Example 1 is also assessed. PBMCs are treated with the constructs for a specified period of time and are then immediately fixed to preserve the phosphorylation status of proteins, such as STAT5. In some experiments, some PBMCs are treated with controls for comparison. In some experiments, some PBMCs are treated with aldesleukin as a control for the masked IL-2 polypeptide treatment. In some experiments, the masked IL-2 polypeptide constructs are tested in conditions with and without protease cleavage (e.g., activation). In some experiments, the PBMCs are treated for 10 minutes, 15 minutes, 20 minutes, or 25 minutes. In some experiments, each construct, as well as aldesleukin and/or other controls, is administered at one or more concentrations, such as one or more concentrations ranging from 0.0001 nM to 500 nM. In some experiments, the fixed and permeabilized PBMCs are then stained with an antibody specific for phosphorylated STAT5 (phospho-STAT5) and are analyzed by flow cytometry. In some experiments, total and phosphorylated levels of STAT5 are measured. The phospho-STAT5 status of certain cell types, such as NK cells, CD8+ T cells, CD4+ T cells, and/or Treg cells, is determined by staining for the particular cell type. In some experiments, the NK cells are stained as CD45+CD3− CD56+, the CD8+ T cells are stained as CD45+CD3+CD8+, the CD4+ T cells are stained as CD45+CD3+CD4+CD25−, and the Treg cells are stained as CD45+CD3+CD4+CD25+ FOXP3+.

[0721] The activation of STAT5 in the mouse cell lines, such as CTLL-2 cells, following treatment with the masked IL-2 polypeptide constructs generated in Example 1 is also assessed. In some experiments, some CTLL-2 cells are treated with controls for comparison. In some experiments, some CTLL-2 cells are treated with aldesleukin as a control for the masked IL-2 polypeptide treatment. In some experiments, the masked IL-2 polypeptide constructs are tested in conditions with and without protease cleavage (e.g., activation). In some experiments, the CTLL-2 cells are treated for 10 minutes, 15 minutes, 20 minutes, or 25 minutes, and are then fixed to preserve the phosphorylation status of proteins, such as STAT5. In some experiments, each construct, as well as aldesleukin and/or other controls, is administered at one or more concentrations. In some experiments, total and phosphorylated levels of STAT5 are measured.

[0722] In some studies, the levels of intracellular STAT5 activation (pSTAT5 signal) induced by IL-2 was determined by the following method. Frozen human PBMCs were thawed in water bath and added to 39 mL pre-warmed media (RPMI1640 medium plus 10% FBS, 1% P/S, 1% NEA), spun and reconstitute in media at 10E6 cells/mL. Cells were plated at 5E5 per well cells in a 96 well plate. IL-2 (e.g., rhIL-2 or an exemplary IL-2-containing polypeptide construct) diluted in medium was added to each well, and incubated at 37° C. for 20 min. Cells were then fix with 200 ul/well Fixation buffer (eBiosciences) at 4° C., overnight. After centrifugation, the fixed cells were resuspended in 200 ul cold BD Phosflow buffer and incubated at 4° C. for 30 min. After washing the cells twice, they were treated with Biolegend Human TruStain FcX (2.5 uL in 50 uL total per sample in Staining buffer) for 5 min on ice. Staining antibodies were added; 5 ul pSTAT5-APC (pY694, BD), 10 ul CD56-BV421 (5.1H11, Biolegend), 10 ul CD4-PerCP/Cy5.5 (A161A1, Biolegend), and 10 ul CD3-FITC (UCHT1, Biolegend) and incubated for 30 min, on ice, protected from light. Cells were washed 2 times and resuspended, and analyzed by flow cytometry.

[0723] FIGS. 8A-8D depict the results from STAT5 activation studies, as described above, using the exemplary constructs AK032, AK035, AK041, or rhIL-2 as a control. The levels of STAT5 activation (%) are shown for NK cells, CD8+ T cells, effector T cells (Teff), and regulatory T cells (Treg). The AK032 and AK035 constructs include an IL-2 polypeptide linked to an Fc domain, and the AK041 construct includes an IL-2 polypeptide linked to a CD25 domain and a CD122 domain. As shown, engineered IL-2 polypeptide constructs can, in some embodiments, reduce activation of Treg cells while retaining or enhancing activation of CD8+ T cells and NK cells.

[0724] FIGS. 9A-9C depict the results from STAT5 activation studies, as described above, using the exemplary constructs AK081 and AK032. The AK081 construct with and without prior exposure to MMP10 was tested. An isotype control as well as a no IL-2 negative control was also tested. The levels of STAT5 activation (%) are shown for NK cells, CD8+ T cells, and CD4+ T cells. The AK032 and AK081 constructs include an IL-2 polypeptide linked to an Fc domain, and the AK081 construct includes a cleavable peptide in the linker connecting the IL-2 polypeptide to the Fc domain. As shown, the non-masked monomeric AK081 IL-2 polypeptide construct stimulates STAT5 activation of PBMCs with or without protease activation similarly to the non-masked dimeric AK032 IL-2 polypeptide construct.

[0725] FIGS. 10A-10D depict the results from STAT5 activation studies, as described above, using the exemplary constructs AK081 and AK111, as well as controls that included an rhIL-2 and anti-RSV antibody. A no-treatment control was also tested. The AK111 construct is an exemplary masked IL-2 polypeptide construct that includes a wildtype form of an IL-2 polypeptide (except for a C125A mutation). As shown in FIGS. 10A-10D, the masked IL-2 polypeptide construct AK111 demonstrated reduced STAT5 activation as compared to the non-masked IL-2 polypeptide construct AK081. FIG. 10D provides EC50 (pM) and fold-change data for the AK081, AK111 constructs, as well as the rhIL-2 control.

[0726] FIGS. 11A-11D depict the results from STAT5 activation studies, as described above, using the exemplary constructs AK167 and AK168, as well as controls that included an rhIL-2 and anti-RSV antibody. A no-treatment control was also tested. The AK168 construct is an exemplary masked IL-2 polypeptide construct that includes a mutant form of an IL-2 polypeptide that eliminates or reduces CD25 binding. The AK167 construct is a parental, non-masked form of the AK168 construct that includes the same mutant IL-2 polypeptide. As shown in FIGS. 11A-11C, the non-masked AK167 construct demonstrated reduced STAT5 activation as compared to the rhIL-2 control, and the masked IL-2 polypeptide construct AK168 did not induce detectable STAT5 activation. FIG. 11D provides EC50 (pM) and fold-change data for the AK167, AK168 constructs, as well as the rhIL-2 control. The EC50 of the AK168 construct was non-detectable (n.d.).

[0727] FIGS. 12A-12D depict the results from STAT5 activation studies, as described above, using the exemplary constructs AK165 and AK166, as well as an isotype control and an IL-2-Fc control, that were (+MMP10) or were not previously exposed to the MMP10 protease. The AK166 construct is an exemplary masked IL-2 polypeptide construct that includes a wildtype form of an IL-2 polypeptide (except for a C125A mutation). The AK165 construct is a parental, non-masked form of the AK166 construct that includes the same IL-2 polypeptide. The key as shown in FIG. 12A also applies to FIG. 12B, and the key as shown in FIG. 12C also applies to FIG. 12D. As shown in FIGS. 12A-12D STAT5 activation was greatly diminished for the masked AK166 construct (without protease cleavage), but was restored to levels resembling the IL2-Fc control following exposure to the activating protease MMP10.

[0728] FIGS. 13A-13C depict the results from STAT5 activation studies, as described above, using the exemplary constructs AK109 and AK110, as well as an isotype control and an IL-2-Fc control, that were (+MMP10) or were not previously exposed to the MMP10 protease. The AK109 and AK110 construct are exemplary masked IL-2 polypeptide constructs that include half-life extension domains having different heterodimerization mutations. The key as shown in FIG. 13B also applies to FIG. 13A. As shown in FIGS. 13A-13C, STAT5 activation was greatly diminished for the masked AK109 and AK110 construct (without protease cleavage), but was greatly increased to levels approaching the IL2-Fc control following exposure to the activating protease MMP10.

[0729] FIGS. 14A-14D depict the results from STAT5 activation studies, as described above, using the constructs AK211, AK235, AK253, AK306, AK310, AK314, and AK316, as well as an an rhIL-2 control. This includes constructs that are parental, non-masked constructs (AK235, AK253, AK306, AK310, AK314) that include various mutations that modulate CD25 binding. FIG. 14D provides EC50 data for each of the tested constructs as well as the rhIL-2 control.

[0730] FIGS. 15A-15D depict the results from STAT5 activation studies, as described above, using the constructs AK081, AK167, AK216, AK218, AK219, AK220, and AK223 that have been activated by protease, as well as an an rhIL-2 control. A no-treatment control was also tested. This includes masked IL-2 polypeptide constructs (AK216, AK218, AK219, AK220, and AK223) that include various mutations that modulate CD25 binding. The constructs were previously exposed to an activating protease prior to testing their ability to activate STAT5. FIG. 15D provides EC50 data for each of the tested constructs as well as the rhIL-2 control.

[0731] FIGS. 16A-16C depict the results from STAT5 activation studies, as described above, using the constructs AK081, AK189, AK190, and AK210, as well as an an anti-RSV control. This includes masked IL-2 polypeptide constructs (AK189, AK190, AK210) that include an IL-2 polypeptide having a C125A mutation and include the same cleavable peptide sequence (RAAAVKSP; SEQ ID NO: 27) but having different linker sequences due to differences in the amino acid residues on the N-terminus of the protease cleavage sequence. The key as shown in FIG. 16A also applies to FIGS. 16B and 16C.

[0732] FIGS. 17A-17C depict the results from STAT5 activation studies, as described above, using the constructs AK167, AK191, AK192, and AK193, as well as an an anti-RSV control. This includes masked IL-2 polypeptide constructs (AK189, AK190, AK210) that include an IL-2 polypeptide having R38A, F42A, Y45A, E62A, and C125A mutations and include the same cleavable peptide sequence (RAAAVKSP; SEQ ID NO: 27) but having different linker sequences due to differences in the amino acid residues on the N-terminus of the protease cleavage sequence. The key as shown in FIG. 17A also applies to FIGS. 17B and 17C.

### Example 3: In Vivo Characterization of Masked IL-2

[0733] Pharmacokinetics

[0734] The pharmacokinetics of the masked IL-2 polypeptide constructs generated in Example 1 is assessed in vivo using mouse models.

[0735] Mice are treated intravenously, intraperitoneally or subcutaneously with the constructs and the concentration of the construct in the plasma is measured over time. In some experiments, some mice are treated with controls for comparison. In some experiments, some mice are treated with aldesleukin as a control for masked IL-2 polypeptide treatment. In some experiments, the mice that are treated have tumors. In some experiments, the mice that are treated are tumor-free. In some experiments, mice are treated with the constructs and blood is drawn at various times over the course of treatment, which may include drawing blood prior to the initiation of treatment and processing it to obtain plasma. In some experiments, blood is drawn at various time points over the course of two weeks, three weeks, or four weeks or more of treatment. In some experiments, the mean plasma concentration of the administered constructs, as well as aldesleukin and/or other controls, is measured. Masked IL-2 polypeptide constructs are detected in the plasma samples after dilution into PBS Tween with IL-2- and human Fc-specific ELISAs and are quantified using a standard curve generated for each construct. The percentage of full length and cleaved constructs is determined by western blot with anti-huFc-HRP and anti-huIL-2-HRP and by whole mass and peptide mass spectrometry.

[0736] The pharmacokinetics of the masked IL-2 polypeptide constructs in tumors is also assessed in vivo using mouse models. Mice having tumors are treated intravenously or subcutaneously with the constructs and the concentration of the construct in tumors of the mice is assessed. In some experiments, some mice are treated with controls for comparison. In some experiments, some mice are treated with aldesleukin as a control for masked IL-2 polypeptide treatment. Tumors are analyzed for the presence of the constructs as well as the presence of particular proteases. In some experiments, the tumors are analyzed for the presence and percentage of full length and cleaved constructs.

[0737] Some pharmacokinetic studies were carried out according to the following method. C57BL/6 female mice were purchased from Charles River Laboratories and were 8-10 weeks old at the start of study. MC38 tumor cells (5×10⁵ cells per mouse) were injected subcutaneously into the right flank of each mouse. Upon reaching ˜100 mm³ sized tumors (day 0), the mice received a single 2 mg/kg intravenous dose of the construct of interest (e.g., a non-masked parental IL-2 polypeptide construct, a masked IL-2 polypeptide construct, or a non-cleavable masked IL-2 polypeptide construct) in PBS. Constructs tested include, for instance, AK032, AK081, AK111, AK167, AK168, AK191, AK197, AK203, AK209, and AK211. Plasma were collected at 5 min, days 1, 2 and 5 after dosing. Drug levels were determined using ELISAs utilizing anti-human IgG (clone M1310G05, Biolegend) as the capture antibody and various detection antibodies. HRP or biotin conjugated detection antibodies against human IgG (ab97225, Abcam) or CD122 (clone 9A2, Ancell) and IL-2 (Poly5176, Biolegend) were utilized to detect total and non-cleaved drug levels, respectively.

[0738] FIGS. 18A-18D describe results from pharmacokinetic studies carried out, as described above, in tumor-bearing mice using the constructs AK032, AK081, AK111, AK167, and AK168, as well as an anti-RSV control. FIG. 18A provides a simplistic depiction of the structure of each of the constructs tested. As indicated, AK111 and AK168 are exemplary masked IL-2 polypeptide constructs. The AK167 and AK168 constructs include mutations (R38A, F42A, Y45A, and E62A) that eliminate or reduce binding to CD25. FIG. 18A shows Fc levels in plasma (μg/mL) by detecting human IgG, FIG. 18C shows Fc-CD122 levels in plasma (μg/mL) by detecting human CD122, and FIG. 18D shows Fc-IL2 levels in plasma (μg/mL) by detecting human IL-2.

[0739] FIGS. 19A-19D describe results from pharmacokinetic studies carried out, as described above, in tumor-bearing mice using the constructs AK167, AK191 AK197, AK203, AK209, and AK211, as well as an anti-RSV control. FIG. 19A provides a simplistic depiction of the structure of each of the constructs tested. As indicated, AK168, AK191, AK197, AK203, and AK209 are exemplary masked IL-2 polypeptide constructs that each include a different cleavable peptide sequence in the linker connecting the IL-2 polypeptide to the half-life extension domain. FIG. 19B shows Fc levels in plasma (μg/mL) by detecting human IgG, FIG. 19C shows Fc-IL2 levels in plasma (μg/mL) by detecting human IL-2, and FIG. 19D shows Fc-CD122 levels in plasma (μg/mL) by detecting human CD122. As shown in FIGS. 19B, 19C and 19D, the Fc levels, Fc-IL2 levels, and Fc-CD122 levels in the plasma are similar among the masked IL-2 polypeptide constructs tested.

[0740] Bioactivity in Mice

[0741] The in vivo bioactivity of the masked IL-2 polypeptide constructs generated in Example 1 is assessed in vivo using mouse models, such as C57BL/6 mice. Mice are treated with the constructs and in vivo bioactivity is assessed. In some experiments, some mice are treated with controls for comparison. In some experiments, some mice are treated with aldesleukin as a control for masked IL-2 polypeptide treatment. In some experiments, the mice that are treated have tumors. In some experiments, the mice that are treated are tumor-free. In some experiments, the dose-dependent expansion of immune cells is assessed in the mice. In some experiments, the mice are treated with various doses of a construct, aldesleukin, or other control. In some experiments, the mice are treated over the course of two weeks. Blood is collected from the mice at various time points and is then stained using antibodies to immune cell markers of interest. In some experiments, the longitudinal kinetics of the proliferation and expansion of certain circulating cell types, such as CD8+ T cells, NK cells, and Treg cells, is also determined, as well as the ratio of CD8+ T cells and NK cells to CD4+CD25+FoxP3+ Treg cells. In some experiments, the mice are assessed for vascular leakage, such as by assessing for edema and lymphocyte infiltration in certain organs like the lung and liver as determined by organ wet weight and histology.

[0742] In some studies, vascular leakage was assessed in order to assess potential toxicity-related effects mediated by IL-2 based therapies by performing the following method. Repeated dose toxicity studies were conducted using C57BL/6 female mice that were purchased from Charles River Laboratories and were 8-10 weeks old weighing 18-22 grams at the start of study. Groups of 5 mice received daily intraperitoneal injections of masked and non-masked IL-2 constructs in PBS daily for 4 or 5 days. The constructs tested included AK081, AK111, AK167, and AK168. A control antibody was also administered as a control. Two hours after the last dose, all mice received an intravenous injection of 0.1 ml of 1% Evans blue (Sigma, cat #E2129) in PBS. Two hours after Evans blue administration, mice were anesthetized and perfused with 10 U/ml heparin in PBS. Spleen, lung and liver were harvested and fixed in 3 ml of 4% PFA 2 days at 4° C. prior to measuring the absorbance of the supernatant at 650 nm with NanoDrop OneC (Thermo Fisher Scientific, Waltham, Mass.) as an indicator of vascular leak of Evans blue. Fixed organs were embedded in paraffin, sectioned, and stained with hematoxylin and eosin. Histopathological studies and quantification were carried out by NovoVita Histopath Laboratory, LLC. (Allston, Mass.) according to standard procedures. FIGS. 25A-50D depict results from an in vivo study as described above for assessing vascular leakage using the exemplary masked IL-2 polypeptide constructs AK111 and AK168, as well as the non-masked IL-2 polypeptide constructs AK081 and AK167, and an anti-RSV control. FIG. 25A shows the percentage (%) of body weight loss, and FIGS. 25B, 25C and 25D shows the weight in grams of the liver, lung, and spleen, respectively, for each.

[0743] Vascular leakage as indicated by measuring the extent of dye leakage into tissues was also assessed for the AK081, AK111, AK167, and AK168 constructs, along with an anti-RSV control, with results shown in FIGS. 26A and 26B for the liver and lung, respectively. The extent of dye leakage was measured based on absorbance at 650 nm.

[0744] Vascular leakage as indicated by measuring the extent of mononuclear cell perivascular invasion into the liver and lung was also assessed for the AK081, AK111, AK167, and AK168 constructs, along with an 10 anti-RSV control, with results shown in FIGS. 27A and 27B for the liver and lung, respectively. The average number of mononuclear cells in the liver (FIG. 27A) and the average number of mononuclear cells in the lung (FIG. 27B) depicted for each. As shown in FIG. 27B, for instance, the masked IL-2 polypeptide constructs AK111 and AK168 did not result in a detectable number of mononuclear cells in the lung, unlike the non-masked constructs AK081 and AK167.

[0745] Infiltrating Immune Cell Phenotype

[0746] The phenotype of immune cells infiltrating tumors in vivo in mouse models treated with the masked IL-2 polypeptide constructs generated in Example 1 is assessed. Mice are treated with the constructs and the phenotype of tumor-infiltrating immune cells is assessed. In some experiments, some mice are treated with controls for comparison. In some experiments, some mice are treated with aldesleukin as a control for masked IL-2 polypeptide treatment. Mice bearing tumors are treated with a construct, aldesleukin, or another control, and tumors, tissues such as liver, lung, and spleen, and blood, are collected at various time points following the initial dose, such as five days, seven days, or ten days after the initial dose. In some experiments, immune cells are isolated from the tumors, tissues, and blood, and are subject to phenotypic assessment using flow cytometry. In some experiments, the isolated immune cells are assessed using markers of interest, such as those for CD8+ T cells, Memory CD8+ T cells, activated NK cells, CD4+ T cells, and CD4+ Treg cells.

[0747] In some studies, the phenotype of immune cells infiltrating tumors in vivo was assessed using the following method. C57BL/6 female mice were purchased from Charles River Laboratories and were 8-10 weeks old at the start of study. MC38 tumor cells (5×10⁵ cells per mouse) were injected subcutaneously into the right flank of each mouse. Upon reaching ˜100 mm³ sized tumors (day 0), the mice received a single 2 mg/kg intravenous dose of the construct of interest (e.g., a non-masked parental IL-2 polypeptide construct, a masked IL-2 polypeptide construct, or a non-cleavable masked IL-2 polypeptide construct) in PBS. On day 5, mice were euthanized by CO2 asphyxiation and tumors, livers, spleens and blood were harvested. Cell suspensions were prepared from spleens by mechanical disruption and and passing through a 40 μm cell strainer. The tumor tissues were enzymatically digested using Miltenyi Tumor Dissociation Kit reagents (Miltenyi cat #130-096-730) and the gentleMACS Dissociator (Miltenyi) was used for the mechanical dissociation steps. Red blood cells in the spleen and tumor cell suspensions and blood were lysed using ACK buffer (Gibco cat #A10492). The cell suspensions were stained with the following antibodies: CD45 (clone 30-F11, eBioscience), CD3 (clone 2C11, Biolegend), CD8 (clone 53-6.7, BD Biosciences), CD4 (clone RM-45, BD Biosciences), FOXP3 (MF-14, Biolegend), CD25 (3C7, Biolegend), CD44 (clone IM7, eBioscience), and NKp46 (29A1.4, eBioscience). Data acquisition was carried out on the MACSQuant Analyzer flow cytometer (Milenyi) and data were analyzed using the FlowJo.

[0748] Results from studies testing the in vivo responses of CD4, CD8, NK, and Treg percentages in spleen, blood, and tumor, as carried out as described above, using the AK032, AK081, AK111, AK167, and AK168 constructs, as well as an anti-RSV IgG control, are shown in FIGS. 20A-20L. AK111 and AK168 are exemplary masked IL-2 polypeptide constructs.

[0749] Results from studies testing the in vivo responses of CD4, CD8, NK, and Treg percentages in spleen, blood, and tumor, as carried out as described above, using the AK167, AK168, AK191, AK197, AK203, AK209, and AK211 constructs, as well as an anti-RSV IgG control, are shown in FIGS. 21A-21L. AK168, AK191, AK197, AK203, and AK209 are exemplary masked IL-2 polypeptide constructs that each include a different cleavable peptide sequence in the linker connecting the IL-2 polypeptide to the half-life extension domain. Statistical analysis was performed using One-way ANOVA as compared to the non-cleavable AK211 construct.

[0750] Results from studies testing the in vivo responses of CD4, CD8, NK, and Treg percentages in spleen, blood, and tumor, as carried out as described above, using the AK235, AK191, AK192, AK193, AK210, AK189, AK190, and AK211 constructs are shown in FIGS. 22A-22L. AK191, AK192, AK193, AK210, AK189, and AK190 are exemplary masked IL-2 polypeptide constructs that each include a cleavable peptide sequence in the linker connecting the IL-2 polypeptide to the half-life extension domain. The linker sequence also differs among these constructs, depending on the linker sequence utilized. AK189, AK190, and AK210 include an IL-2 polypeptide having a C125A mutation, and AK191, AK192, and AK193 include an IL-2 polypeptide having C125A, R38A, F42A, Y45A, and E62A mutations. The AK235 construct is a non-masked construct and the AK211 construct includes a non-cleavable linker sequence. Statistical analysis was performed using One-way ANOVA as compared to the non-cleavable AK211 construct.

[0751] Results from studies testing the in vivo T cell activation in spleen, blood, and tumor, as carried out as described above, using the AK235, AK191, AK192, AK193, AK210, AK189, AK190, and AK211 constructs, as described above, are shown in FIGS. 23A-23I. T cell activation was measured as the mean fluorescence intensity (MFI) of CD25 in CD8+ T cells, CD4+ T cells, or Foxp3+ cells in the spleen, blood, and tumor. Statistical analysis was performed using One-way ANOVA as compared to the non-cleavable AK211 construct.

[0752] In Vivo Cleavage

[0753] The in vivo cleavage of masked IL-2 cytokine constructs is assessed. In some studies, a control antibody is administered for comparison. In some studies, in vivo cleavage is assessed by administering the construct of interest in a mouse and, after a certain period of time, capturing human IgG and then measuring the levels of, e.g., human IgG, CD122, and IL-2.

[0754] In some studies testing the in vivo cleavage of masked IL-2 polypeptide constructs, drug levels (i.e., levels of the administered construct, including cleavage byproducts) were determined using ELISAs utilizing anti-human IgG (clone M1310G05, Biolegend) as the capture antibody and various detection antibodies. HRP or biotin conjugated detection antibodies against human IgG (ab97225, Abcam) or CD122 (clone 9A2, Ancell) and IL-2 (Poly5176, Biolegend) were utilized to detect total and non-cleaved drug levels, respectively. The concentrations of cleaved and released IL-2 is calculated by subtracting non-cleaved (i.e., intact) from total drug concentrations. FIGS. 24A-24D depict the results from studies testing the in vivo cleavage of the exemplary masked IL-2 polypeptide constructs AK168 (cleavable peptide sequence: MPYDLYHP; SEQ ID NO: 24) and AK209 (cleavable peptide sequence: VPLSLY; SEQ ID NO: 28). The AK167 construct is a cleavable non-masked IL-2 polypeptide construct that includes the same IL-2 polypeptide as the masked AK168 construct. As shown in FIGS. 24A-24D, both the masked (AK168 and AK209) and non-masked (AK167) constructs were effectively cleaved, and both cleavable peptide sequences were cleaved. FIG. 24E depicts results from a pharmacokinetic study of total plasma IgG concentration (μg/mL) for total levels of the AK167, AK168, and AK209 constructs, and for levels of non-cleaved forms of each construct.

[0755] Tumor Eradication and Inhibition of Metastasis

[0756] The ability of the masked IL-2 polypeptide constructs generated in Example 1 to promote tumor eradication and to inhibit metastasis is assessed in vivo using mouse models, such as syngeneic MC38, CT26, and B16F10 tumor models.

[0757] Mice are implanted with tumor cells subcutaneously, and tumors are allowed to grow to a palpable size. Tumor-bearing mice are treated with the masked IL-2 constructs or the masked IL-15 polypeptide constructs and tumor volume is measured over the course of treatment. In some experiments, some mice are treated with controls for comparison. In some experiments, some mice are treated with aldesleukin as a control for masked IL-2 polypeptide treatment. Tumor volume is measured periodically over the course of treatment. In some experiments, body weight is also measured periodically over the course of treatment. In some experiments, plasma samples are produced over the course of the treatment and analyzed for pharmacokinetics, pharmacodynamics, cleavage, and blood markers, such as those for CD8+ T cells, Memory CD8+ T cells, activated NK cells, CD4+ T cells, and CD4+ Treg cells.

[0758] The capability of the masked IL-2 polypeptide constructs to inhibit metastasis is also assessed in vivo using mouse models suitable for metastasis studies, such as syngeneic CT26 tumor models for assessing lung metastasis. Mice are implanted with tumor cells subcutaneously. In some experiments, tumors are allowed to grow to a palpable size prior to treatment. In some experiments, treatment begins before tumors grow to palpable size. Tumor-bearing mice are treated with the masked IL-2 constructs are assessed for tumor cell metastasis into tissues such as lungs, liver, and lymph nodes.

[0759] In some studies, a syngeneic tumor model was used to assess the ability of masked IL-2 polypeptide constructs to reduce tumor volume in accordance with the following method. C57BL/6 female mice were purchased from Charles River Laboratories and were 8-10 weeks old at the start of study. MC38 tumor cells (5×105 cells per mouse) were injected subcutaneously into the right flank of each mouse. Upon reaching ˜125 mm3 sized tumors (day 0), the mice were randomized to receive 2 mg/kg doses of AK081, AK111, AK167, or AK168, or an anti-RSV antibody as a control, in PBS. Mice were dosed intraperitoneally, three times a week for 6 doses. Tumor volume was calculated (Length*(Width\hat{ }2)/2) using dial calipers and body weights were recorded twice weekly. FIGS. 28A and 28B show results from a syngeneic tumor model study that assessed tumor volume and body weight over the course of treatment. As shown in FIG. 28A, treatment using exemplary IL-2 polypeptide constructs, including the masked constructs AK111 and AK168, resulted in tumor growth inhibition over time as compared to the anti-RSV control. As shown in FIG. 28B, there was a general lack of body weight reduction observed when the mice were treated with the masked constructs AK111 and AK168.

[0760] Bioactivity in Cynomolgus Monkeys

[0761] The in vivo bioactivity of the masked IL-2 polypeptide constructs generated in Example 1 is assessed in vivo in cynomolgus monkeys. Cynomolgus monkeys are treated with the constructs and in vivo bioactivity, pharmacokinetics, and cleavage is assessed. In some experiments, some monkeys are treated with controls for comparison. In some experiments, some monkeys are treated with aldesleukin as a control for masked IL-2 polypeptide treatment. In some experiments, the monkeys are treated with various doses of the construct, aldesluekin, or other control. Blood is collected from the monkeys at various time points and is then evaluated for certain cell types, such as CD8+ T cells, Memory CD8+ T cells, activated NK cells, CD4+ T cells, and CD4+ Treg cells, and/or markers of interest, such as for the dose-response of total lymphocytes, Ki67+, and of soluble CD25. In some experiments, the longitudinal kinetics of the proliferation and expansion of certain circulating T and NK cell types is assessed. In some experiments, pharmacokinetics and cleavage of the masked IL-2 polypeptide constructs are determined by ELISA, PAGE, and mass spectrometry.

[0762] To test the safety profile of exemplary masked IL-2 polypeptide constructs in non-human primates, a dose ranging study is performed in accordance with the following method. Groups of 3 healthy male cynomolgus monkeys (Macacafascicularis) are randomly assigned to receive a single intravenous bolus dose of 2 mL/kg of activatable (i.e., cleavable) masked IL-2 polypeptide proteins or non-cleavable masked IL-2 polypeptide proteins at 10, 30 and 100 nmol/kg in 100 mM sodium citrate buffer (pH 5.5). A third group receives the parental non-masked, cleavable protein at 3, 10 and 30 nmol/kg as a positive control. This third group is dosed at a lower range to account for higher potency of the parental non-masked molecules. Doses are calculated in moles to account for differences in molecular weight. Blood samples are collected before dosing and 1, 24, 48, 72, 96, 168, 264 and 336 hours post-dosing. An automated hematology analyzer is used to monitor changes in lymphocyte subsets and serum chemistry. Total and intact (i.e., non-cleaved) drug levels are measured from plasma using custom ELISA as described above. Soluble CD25 levels are measured with an ELISA (R&D systems, cat #DR2A00) to monitor immune stimulation. Plasma levels of inflammatory cytokines are quantified using custom multiplexed electrochemiluminescence assay (Meso Scale Discovery). Blood pressure is monitored as an indicator of vascular leak syndrome. PK is analyzed using an ELISA that captures IL-2 and detects human Fc and by an ELISA that captures human Fc and detects human Fc.

### Example 4

[0763] C57BL/6 female mice were purchased from Charles River Laboratories and were 8-10 weeks old at the start of study. MC38 tumor cells (5×10⁵ cells per mouse) were injected subcutaneously into the right flank of each mouse. Upon reaching ˜100 mm³ sized tumors (day 0), the mice received a single high dose intraperitoneal dose of various Fc-IL-2 constructs in PBS. Plasma were collected at 5 min, days 3, 5 and 7 after dosing.

[0764] The constructs used are:

[0765] Immunophenotyping was performed using a FACS-based method. On day 5, mice were euthanized by C02 asphyxiation and tumors, livers, spleens and blood were harvested. Cell suspensions were prepared from spleens by mechanical disruption and and passing through a 40 m cell strainer. The tumor tissues were enzymatically digested using Miltenyi Tumor Dissociation Kit reagents (Miltenyi cat #130-096-730) and the gentleMACS Dissociator (Miltenyi) was used for the mechanical dissociation steps. Red blood cells in the spleen and tumor cell suspensions and blood were lysed using ACK buffer (Gibco cat #A 10492).

[0766] The cell suspensions were stained with the following antibodies: CD45 (clone 30-F11, eBioscience), CD3 (clone 2C11, Biolegend), CD8 (clone 53-6.7, RD Biosciences), CD4 (clone RM-45, BD Biosciences). Data acquisition was carried out on the MACSQuant Analyzer flow cytometer (Milenyi) and data were analyzed using the FlowJo.

[0767] Drug levels were determined using ELISAs utilizing anti-human IgG (clone M1310G05, Biolegend) as the capture antibody and various detection antibodies. HRP or biotin conjugated detection antibodies against human IgG (ab97225, Abcam) or CD122 (clone 9A2, Ancell) and IL-2 (Poly5176, Biolegend) were utilized to detect total and non-cleaved drug levels, respectively.

[0768] AK471 with I253A FcRn mutation induced robust CD8 T cells expansion in the TME while remaining inactive in the periphery as shown in FIGS. 29A and 29B.

[0769] AK471 has slightly shorter half-life compared to aglyco-hIgG1 as shown in FIGS. 30 A, B and C.

[0770] There is no evidence of cleavage or decapitation with AK471 in the plasma (FIGS. 31 A, B and C).

### Example 5

[0771] Summary of Cys to Ser Mutations on CD122

[0772] The two free cysteines on the CD122 masking domain were mutated to serines to increase protein stability and mitigate developability risks including, without being limited as to theory, aggregation, oxidation, and immunogenicity. The mutant was evaluated in an accelerated stability study, where the control and the Cys to Ser mutant was incubated for a prolonged time (3 weeks), with elevated temperature (40° C.), and in multiple pHs. Various analyses were performed to assess the impact of the cysteine mutations. The results demonstrate that the Cys to Ser mutant clearly enhanced the protein stability as evidenced by significantly reduced aggregation under stress. After 3 weeks incubation at pH8.0, the constructs with the cysteines mutated exhibit low levels of aggregation as compared to the control constructs, which do not contain the cysteine mutations, that have greater than fifty (50) percent aggregation as measured by SEC-HPLC. CE-SDS demonstrated that the construct with the mutated cysteines remains unaggregated (>99%) for pH6.0 and pH8.0 incubation, where the control constructs contained levels of aggregation up to fifteen (15) percent 1.

[0773] In addition, constructs with the mutated cysteines in the CD122 masking protein interact with the IL-2 protein in a similar manner as the control constructs, which contain a wild-type CD122 masking protein (i.e. without mutation of the cysteine residues). In addition, the constructs with the mutated cysteines in the CD122 masking protein are similar in both functional assays and pharmacodynamics studies as the control constructs, which contain a CD122 masking protein without the cysteine mutations.

[0774] Experimental Protocols

[0775] Stability Study

[0776] Samples were incubated in a Galaxy 170 S air incubator set to 40° C. Three buffer systems were tested: 20 mM Citrate pH 5.0, 20 mM histidine pH 6.0, and 20 mM tris pH 8.0. The pH of each was calibrated at room temperature (approximately 27C) and buffers were adjusted to within 0.05 pH units with HCl/NaOH. Buffers were filtered by 0.22 um bottle top filters. Samples were buffer exchanged approximately 3000-fold into starting buffer via spin concentration. Sample aliquots were removed under sterile conditions at day 0, 1, 3, 7, 14, and 21, and stored at −80° C. before being evaluated in the below analytical tests.

[0777] SEC-HPLC

[0778] An HPLC system was used to assess the aggregation level in the incubated samples; the system was calibrated with along with molecular weight standards. Levels of high molecular weight species (“HMWS”) were measured in each sample. Increases in HMWS indicated increasing levels of aggregation.

[0779] The results of these studies is shown in FIGS. 32A and 32B. The key represents ‘AK’ molecule numbers, where AK341 is a Cys to Ser mutant and AK209 is a control.

[0780] CE-SDS

[0781] CE-SDS was run on a labchip machine. In general, a reducing agent was used for experiments under reducing conditions. Samples were subjected to high heat before samples were loaded into 96-well PCR plate. Recombinant human IL-2 was used as a low molecular weight protein control. Levels of HMWS were measured in each sample. Increases in HMWS indicated increasing levels of aggregation.

[0782] The results of these studies is shown in FIGS. 33A-33D. The key represents ‘AK’ molecule numbers, where AK341 is a Cys to Ser mutant and AK209 is a control.

### Example 6

[0783] The constructs used are as follows:

| AK # | Protease Substrate | Protease Site on | Half-life extension |
|---|---|---|---|
| AK209 | VPLSLY | IL-2 | agly-hlgG1 |
| AK341* | VPLSLY | IL-2 | agly-hlgG1 |
| AK438 | VPLSLY | CD122 | agly-hlgG1 |
| AK471 | VPLSLY | IL-2 | FcRn I253A |
| AK508 | VPLSLY | CD122 | FcRn I253A |
| AK504 | VPLSLY | IL-2 | hlgG4 |
| AK511 | VPLSLY | CD122 | hlgG4 |
| AK203 | DSGGFMLT | IL-2 | agly-hlgG1 |
| AK442 | DSGGFMLT | CD122 | agly-hlgG1 |
| AK168 | MPYDLYHP | IL-2 | agly-hlgG1 |
| AK252 | MPYDLYHP | CD122 | agly-hlgG1 |
| AK509 | MPYDLYHP | IL-2 | FcRn I253A |
| AK510 | MPYDLYHP | CD122 | FcRn I253A |
| AK191 | RAAAVKSP | IL-2 | agly-hlgG1 |
| AK503 | RAAAVKSP | CD122 | agly-hlgG1 |

AK211—Non-cleavable
AK253—parental (no mask); no cleavage site; always active
AK341* Contains two cys → ser mutations on CD122

[0784] i. Anti-Tumor Activity—AK438 and AK442

[0785] C57BL/6 female mice were purchased from Charles River Laboratories and were 8-10 weeks old at the start of study. MC38 tumor cells (5×105 cells per mouse) were injected subcutaneously into the right flank of each mouse. Upon reaching ˜100 mm3 sized tumors (day 0), the mice were randomized to receive Fc-IL-2 constructs in PBS. Mice were dosed intravenously on days 0, 3 and 6. Tumor volume was calculated (Length*(Width\hat{ }2)/2) using dial calipers and body weights were recorded twice weekly. Mice were sacrificed upon reaching humane end points of tumor burden (2000 mm3) or body weight loss due to toxicity (20%).

[0786] Results are shown in FIGS. 34A and B.

[0787] ii. Peripheral (Spleen) Vs Tumor CD8 T Cell Expansion—AK438 and AK442

[0788] C57BL/6 female mice were purchased from Charles River Laboratories and were 8-10 weeks old at the start of study. MC38 tumor cells (5×10⁵ cells per mouse) were injected subcutaneously into the right flank of each mouse. Upon reaching ˜100 mm³ sized tumors (day 0), the mice were randomized to receive AK253 at very low dose level and all other Fc-IL-2 constructs at high dose level in PBS. Mice were dosed intravenously on days 0, 3 and 6.

[0789] Immunophenotyping on day 7 was performed using a FACS-based method from peripheral blood. Red blood cells were lysed using ACK buffer (Gibco cat #A10492). The cell suspensions were stained with the following antibodies: CD45 (clone 30-F11, eBioscience), CD3 (clone 2C11, Biolegend), CD8 (clone 53-6.7, BD Biosciences), CD4 (clone RM-45, BD Biosciences) and Ki-67 (clone SOLA15, eBioscience). Data acquisition was carried out on the MACSQuant Analyzer flow cytometer (Milenyi) and data were analyzed using the FlowJo. A one-way ANOVA with Bonferonni's post-test was performed to determine the statistical significance of treatment vs. control AK211) (*P<0.05; **P<0.01; ***P<0.001; ****P<0.0001).

[0790] Results are shown in FIGS. 35A and B.

[0791] iii. Anti-Tumor Activity—AK252, AK438, AK209 and AK471

[0792] C57BL/6 female mice were purchased from Charles River Laboratories and were 8-10 weeks old at the start of study. MC38 tumor cells (5×105 cells per mouse) were injected subcutaneously into the right flank of each mouse. Upon reaching ˜100 mm3 sized tumors (day 0), the mice were randomized to receive AK253 at very low dose level and all other Fc-IL-2 constructs at high dose level in PBS. Mice were dosed intravenously on days 0, 3 and 6. Tumor volume was calculated (Length*(Width\hat{ }2)/2) using dial calipers and body weights were recorded twice weekly. Mice were sacrificed upon reaching humane end points of tumor burden (2000 mm3) or body weight loss due to toxicity (20%).

[0793] Results are shown in FIGS. 36A and 36B.

[0794] iv. Peripheral (Spleen) Vs Tumor CD8 T Cell Expansion—AK252, AK438, AK209, AK471

[0795] C57BL/6 female mice were purchased from Charles River Laboratories and were 8-10 weeks old at the start of study. MC38 tumor cells (5×105 cells per mouse) were injected subcutaneously into the right flank of each mouse. Upon reaching ˜100 mm3 sized tumors (day 0), the mice were randomized to receive AK253 at very low dose level and all other Fc-IL-2 constructs at high dose level in PBS. Mice were dosed intravenously on days 0, 3 and 6.

[0796] Immunophenotyping on day 7 was performed using a FACS-based method from peripheral blood. Red blood cells were lysed using ACK buffer (Gibco cat #A10492). The cell suspensions were stained with the following antibodies: CD45 (clone 30-F11, eBioscience), CD3 (clone 2C11, Biolegend), CD8 (clone 53-6.7, BD Biosciences), CD4 (clone RM-45, BD Biosciences) and Ki-67 (clone SOLA15, eBioscience). Data acquisition was carried out on the MACSQuant Analyzer flow cytometer (Milenyi) and data were analyzed using the FlowJo. A one-way ANOVA with Bonferonni's post-test was performed to determine the statistical significance of treatment vs. control AK211) (*P<0.05; **P<0.01; ***P<0.001; ****P<0.0001).

[0797] Results are shown in FIGS. 37A and 37B.

[0798] v. Anti-Tumor Activity—AK252, AK442, AK203, AK508 and AK510

[0799] C57BL/6 female mice were purchased from Charles River Laboratories and were 8-10 weeks old at the start of study. MC38 tumor cells (5×105 cells per mouse) were injected subcutaneously into the right flank of each mouse. Upon reaching ˜100 mm3 sized tumors (day 0), the mice were randomized to receive AK253 at very low dose level and all other Fc-IL-2 constructs at high dose level in PBS. Mice were dosed intravenously on days 0, 3 and 6. Tumor volume was calculated (Length*(Width\hat{ }2)/2) using dial calipers and body weights were recorded twice weekly. Mice were sacrificed upon reaching humane end points of tumor burden (2000 mm3) or body weight loss due to toxicity (20%).

[0800] Results are shown in FIGS. 38A and 38B.

[0801] vi. Peripheral (Spleen) Vs Tumor CD8 T Cell Expansion—AK252, AK442, AK203, AK508 and

[0802] AK510 C57BL/6 female mice were purchased from Charles River Laboratories and were 8-10 weeks old at the start of study. MC38 tumor cells (5×105 cells per mouse) were injected subcutaneously into the right flank of each mouse. Upon reaching ˜100 mm3 sized tumors (day 0), the mice were randomized to receive AK253 at very low dose level and all other Fc-IL-2 constructs at high dose level in PBS. Mice were dosed intravenously on days 0, 3 and 6.

[0803] Immunophenotyping on day 7 was performed using a FACS-based method from peripheral blood. Red blood cells were lysed using ACK buffer (Gibco cat #A10492). The cell suspensions were stained with the following antibodies: CD45 (clone 30-F11, eBioscience), CD3 (clone 2C11, Biolegend), CD8 (clone 53-6.7, BD Biosciences), CD4 (clone RM-45, BD Biosciences) and Ki-67 (clone SOLA15, eBioscience). Data acquisition was carried out on the MACSQuant Analyzer flow cytometer (Milenyi) and data were analyzed using the FlowJo. A one-way ANOVA with Bonferonni's post-test was performed to determine the statistical significance of treatment vs. control AK211) (*P<0.05; **P<0.01; ***P<0.001; ****P<0.0001).

[0804] Results are shown in FIGS. 39A and 39B.

[0805] vii. Anti-Tumor Activity—AK252, AK508, AK509, AK510, AK511

[0806] C57BL/6 female mice were purchased from Charles River Laboratories and were 8-10 weeks old at the start of study. MC38 tumor cells (5×105 cells per mouse) were injected subcutaneously into the right flank of each mouse. Upon reaching ˜100 mm3 sized tumors (day 0), the mice were randomized to receive AK253 at very low dose level and all other Fc-IL-2 constructs at high dose level in PBS. Mice were dosed intravenously on days 0, 3 and 6. Tumor volume was calculated (Length*(Width\hat{ }2)/2) using dial calipers and body weights were recorded twice weekly. Mice were sacrificed upon reaching humane end points of tumor burden (2000 mm3) or body weight loss due to toxicity (20%).

[0807] Results are shown in FIGS. 40A-40D.

[0808] viii. Peripheral (Spleen) Vs Tumor CD8 T Cell Expansion—AK252, AK508, AK509, AK510, AK511

[0809] C57BL/6 female mice were purchased from Charles River Laboratories and were 8-10 weeks old at the start of study. MC38 tumor cells (5×105 cells per mouse) were injected subcutaneously into the right flank of each mouse. Upon reaching ˜100 mm3 sized tumors (day 0), the mice were randomized to receive AK253 at very low dose level and all other Fc-IL-2 constructs at high dose level in PBS. Mice were dosed intravenously on days 0, 3 and 6.

[0810] Immunophenotyping on day 7 was performed using a FACS-based method from peripheral blood. Red blood cells were lysed using ACK buffer (Gibco cat #A10492). The cell suspensions were stained with the following antibodies: CD45 (clone 30-F11, eBioscience), CD3 (clone 2C11, Biolegend), CD8 (clone 53-6.7, BD Biosciences), CD4 (clone RM-45, BD Biosciences) and Ki-67 (clone SOLA15, eBioscience). Data acquisition was carried out on the MACSQuant Analyzer flow cytometer (Milenyi) and data were analyzed using the FlowJo. A one-way ANOVA with Bonferonni's post-test was performed to determine the statistical significance of treatment vs. control AK211) (*P<0.05; **P<0.01; ***P<0.001; ****P<0.0001). AK252++ produced in-house lot #AK252-06B, AK252 produced by ATUM lot #AK252-A-01A.

[0811] Results shown in FIGS. 41A and 41B.

[0812] ix. Anti-Tumor Activity—AK252, AK438, AK442, AK209, AK341

[0813] C57BL/6 female mice were purchased from Charles River Laboratories and were 8-10 weeks old at the start of study. MC38 tumor cells (5×105 cells per mouse) were injected subcutaneously into the right flank of each mouse. Upon reaching ˜100 mm3 sized tumors (day 0), the mice were randomized to receive AK253 at very low dose level and all other Fc-IL-2 constructs at high dose level in PBS. Mice were dosed intravenously on days 0, 3 and 6. Tumor volume was calculated (Length*(Width\hat{ }2)/2) using dial calipers and body weights were recorded twice weekly. Mice were sacrificed upon reaching humane end points of tumor burden (2000 mm3) or body weight loss due to toxicity (20%).

[0814] Results are shown in FIGS. 42A and 42B.

[0815] x. Splenomegaly and Lung Edema—AK252, AK438, AK442, AK209, AK341

[0816] C57BL/6 female mice were purchased from Charles River Laboratories and were 8-10 weeks old at the start of study. MC38 tumor cells (5×105 cells per mouse) were injected subcutaneously into the right flank of each mouse. Upon reaching ˜100 mm3 sized tumors (day 0), the mice were randomized to receive AK253 at very low dose level and all other Fc-IL-2 constructs at high dose level in PBS. Mice were dosed intravenously on days 0, 3 and 6. Tissues were harvested and weighed on day 6.

[0817] Results are shown in FIGS. 43A and 43B.

### Example 7

[0818] i. Cleavage of Peptides by NAT Vs. RCC Culture Supernatant

[0819] Sequences comprising cleavage peptides (shown in bold below) were incubated in either ‘NAT’ (Normal Adjacent Tissue) or ‘RCC’ (Renal Cell Carcinoma) culture supernatants, to test the specificity of each peptide's cleavage.

[0820] To this end, peptide sequencing by mass spectrometry was used to identify cleaved fragments produced for the synthetic peptides shown in the table below, using a published technique called multiplexed substrate profiling by mass spectrometry (MSP-MS) (O'Donoghue A. J. et al. Nat Methods. 2012 November; 9(11):1095-100.) Cleavages were monitored in these reactions over time, and the peptides found to be cleaved in the earliest time points were deemed to be most sensitive to proteolytic activity in the conditioned media samples.

[0821] Results are as follows:

| | AMSP-MS Synthetic Peptide | | | | |
|---|---|---|---|---|---|
| | Sequence | | | Earliest | Earliest |
| | (bolded sequences show the | | | cleaved | cleaved |
| | cleavable peptide; * indicates | | | time point | time point |
| Substrate | cleavage site) | NAT | RCC | -NAT | -RCC |
| AK-15 | RSGVPLS*LYSGSGGGK | 0 | 3/5 | | 15 min |
| AK-18 | RSGMP*YDLY*HPSGK | 5/5 | 5/5 | 15 min | 15 min |
| AK-21 | RGPDSGGF*ML*TSGK | 3/5 | 5/5 | 15 min | 15 min |
| AK-28 | RGSGHEQLTVSGGSK | 0 | 0 | | |
| AK-49 | RSGR*AAAVKSPSGK | 0 | 3/5 | | 15-60- |
| | | | | | 240 min |
| AK-02 | RGSGISSGLLSGRS*D*N*HSGK | 5/5 | 5/5 | 15-60 min | 15-60 min |
| AK-50 | RGDLLAVVA*ASGGK | 0 | 5/5 | | 15-60 min |
| AK-88 | RGGISSGLL*SG*RSGK | 0 | 5/5 | | 15-60 min |

[0822] Cleavage peptides DLLAVVA*AS and ISSGLL*SG*RS were found to be the most specific. Sequences comprising these peptides did not cleave in the NAT culture, but cleaved in every run in the RCC culture.

### Example 8

[0823] The following constructs were used in this example:

[0824] Details on the domain features and sequences of each AK molecule is as follows:

| | | | |
|---|---|---|---|
| AK904 | 1^{st} polypeptide | DKTHTCPPCPAPELLGGPSVFLFPPKPKDTLMIS | DNA158 |
| | chain: | RTPEVTCVVVDVSHEDPEVKFNWYVDGVEVH | |
| | Fc(Hole) | NAKTKPREEQYASTYRVVSVLTVLHQDWLNG | |
| | | KEYKCKVSNKALPAPIEKTISKAKGQPREPQVC | |
| | | TLPPSRDELTKNQVSLSCAVKGFYPSDIAVEWE | |
| | | SNGQPENNYKTTPPVLDSDGSFFLVSKLTVDK | |
| | | SRWQQGNVFSCSVMHEALHNHYTQKSLSLSPGK | |
| | 2^{nd} polypeptide | DKTHTCPPCPAPELLGGPSVFLFPPKPKDTL | AK904 |
| | chain: | MISRTPEVTCVVVDVSHEDPEVKFNWYVD | |
| | Fc(knob)-IL15 | GVEVHNAKTKPREEQYASTYRVVSVLTVL | |
| | V1 Non- | HQDWLNGKEYKCKVSNKALPAPIEKTISKA | |
| | cleavable (N71Q, | KGQPREPQVYTLPPCRDELTKNQVSLWCLV | |
| | N79Q) | KGFYPSDIAVEWESNGQPENNYKTTPPVLD | |
| | | SDGSFFLYSKLTVDKSRWQQGNVFSCSVMHE | |
| | | ALHNHYTQKSLSLSPGGGSSPPGGGSSGGGSG | |
| | | PSGSPGNWVNVISDLKKIEDLIQSMHIDATLY | |
| | | TESDVHPSCKVTAMKCFLLELQVISLESGDASI | |
| | | HDTVENLIILAQNSLSSNGQVTESGCKECEEL | |
| | | EEKNIKEFLQSFVHIVQMFINTS | |
| AK910 | 1^{st} polypeptide | DKTHTCPPCPAPELLGGPSVFLFPPKPKDTLMISRTPE | DNA440 |
| | chain: | VTCVVVDVSHEDPEVKFNWYVDGVEVHNAKTKPRE | |
| | FC(Hole) | EQYASTYRVVSVLTVLHQDWLNGKEYKCKVSNKAL | |
| | CD122(C122S, | PAPIEKTISKAKGQPREPQVCTLPPSRDELTKNQVSLS | |
| | C168S) | CAVKGFYPSDIAVEWESNGQPENNYKTTPPVLDSDG | |
| | | SFFLVSKLTVDKSRWQQGNVFSCSVMHEALHNHYTQ | |
| | | KSLSLSPGPGSGSAVNGTSQFTCFYNSRANISCVWSQ | |
| | | DGALQDTSCQVHAWPDRRRWNQTCELLPVSQASW | |
| | | ACNLILGAPDSQKLTTVDIVTLRVLCREGVRWRVMA | |
| | | IQDFKPFENLRLMAPISLQVVHVETHRSNISWEISQAS | |
| | | HYFERHLEFEARTLSPGHTWEEAPLLTLKQKQEWIS | |
| | | LETLTPDTQYEFQVRVKPLQGEFTTWSPWSQPLAF | |
| | | RTKPAALGKD | |
| | 2^{nd} polypeptide | DKTHTCPPCPAPELLGGPSVFLFPPKPKDTL | DNA904 |
| | chain: | MISRTPEVTCVVVDVSHEDPEVKFNWYVD | |
| | Fc(knob)-IL15 | GVEVHNAKTKPREEQYASTYRVVSVLTVL | |
| | V1 Non- | HQDWLNGKEYKCKVSNKALPAPIEKTISKA | |
| | cleavable (N71Q, | KGQPREPQVYTLPPCRDELTKNQVSLWCLV | |
| | N79Q) | KGFYPSDIAVEWESNGQPENNYKTTPPVLD | |
| | | SDGSFFLYSKLTVDKSRWQQGNVFSCSVMHE | |
| | | ALHNHYTQKSLSLSPGGGSSPPGGGSSGGGSG | |
| | | PSGSPGNWVNVISDLKKIEDLIQSMHIDATLY | |
| | | TESDVHPSCKVTAMKCFLLELQVISLESGDASI | |
| | | HDTVENLIILAQNSLSSNGQVTESGCKECEEL | |
| | | EEKNIKEFLQSFVHIVQMFINTS | |
| AK932 | 1^{st} polypeptide | DKTHTCPPCPAPELLGGPSVFLFPPKPKDTLMISRTPE | DNA440 |
| | chain: | VTCVVVDVSHEDPEVKFNWYVDGVEVHNAKTKPRE | |
| | Fc(Hole) | EQYASTYRVVSVLTVLHQDWLNGKEYKCKVSNKAL | |
| | CD122(C122S, | PAPIEKTISKAKGQPREPQVCTLPPSRDELTKNQVSLS | |
| | C168S) | CAVKGFYPSDIAVEWESNGQPENNYKTTPPVLDSDG | |
| | | SFFLVSKLTVDKSRWQQGNVFSCSVMHEALHNHYTQ | |
| | | KSLSLSPGPGSGSAVNGTSQFTCFYNSRANISCVWSQ | |
| | | DGALQDTSCQVHAWPDRRRWNQTCELLPVSQASW | |
| | | ACNLILGAPDSQKLTTVDIVTLRVLCREGVRWRVMA | |
| | | IQDFKPFENLRLMAPISLQVVHVETHRSNISWEISQAS | |
| | | HYFERHLEFEARTLSPGHTWEEAPLLTLKQKQEWIS | |
| | | LETLTPDTQYEFQVRVKPLQGEFTTWSPWSQPLAF | |
| | | RTKPAALGKD | |
| | 2^{nd} polypeptide | DKTHTCPPCPAPELLGGPSVFLFPPKPKDTLMISRTPEV | DNA924 |
| | chain: | TCVVVDVSHEDPEVKFNWYVDGVEVHNAKTKPREE | |
| | Fc(knob)- | QYASTYRVVSVLTVLHQDWLNGKEYKCKVSNKALP | |
| | [DLLAVVAAS] | APIEKTISKAKGQPREPQVYTLPPCRDELTKNQVSLW | |
| | -IL15 | CLVKGFYPSDIAVEWESNGQPENNYKTTPPVLDSDGS | |
| | (N71Q, N79Q) | FFLYSKLTVDKSRWQQGNVFSCSVMHEALHNHYTQKS | |
| | *cleavable | LSLSPGSGSDLLAVVAASSGPGSGNWVNVISDLKKIE | |
| | peptide bolded | DLIQSMHIDATLYTESDVHPSCKVTAMKCFLLELQVISL | |
| | | ESGDASIHDTVENLIILAQNSLSSNGQVTESGCKECEE | |
| | | LEEKNIKEFLQSFVHIVQMFINTS | |
| AK938 | 1^{st} polypeptide | DKTHTCPPCPAPELLGGPSVFLFPPKPKDTLMISRT | DNA822 |
| | chain: | PEVTCVVVDVSHEDPEVKFNWYVDGVEVHNAK | |
| | Fc(hole)- | TKPREEQYASTYRVVSVLTVLHQDWLNGKEYK | |
| | [DLLAVVAAS] | CKVSNKALPAPIEKTISKAKGQPREPQVCTLPPS | |
| | -CD122 | RDELTKNQVSLSCAVKGFYPSDIAVEWESNGQ | |
| | *cleavable | PENNYKTTPPVLDSDGSFFLVSKLTVDKSRWQQ | |
| | peptide bolded | GNVFSCSVMHEALHNHYTQKSLSLSPGSGSPSGD | |
| | | LLAVVAASSGPGSGSPAVNGTSQFTCFYNSRANISC | |
| | | VWSQDGALQDTSCQVHAWPDRRRWNQTCELLPV | |
| | | SQASWACNLILGAPDSQKLTTVDIVTLRVLCREGV | |
| | | RWRVMAIQDFKPFENLRLMAPISLQVVHVETHRSN | |
| | | ISWEISQASHYFERHLEFEARTLSPGHTWEEAPLLTL | |
| | | KQKQEWISLETLTPDTQYEFQVRVKPLQGEFTT | |
| | | WSPWSQPLAFRTKPAALGKD | |
| | 2^{nd} polypeptide | DKTHTCPPCPAPELLGGPSVFLFPPKPKDTL | DNA904 |
| | chain: | MISRTPEVTCVVVDVSHEDPEVKFNWYVD | |
| | Fc(knob)-IL15 | GVEVHNAKTKPREEQYASTYRVVSVLTVL | |
| | V1 Non- | HQDWLNGKEYKCKVSNKALPAPIEKTISKA | |
| | cleavable (N71Q, | KGQPREPQVYTLPPCRDELTKNQVSLWCLV | |
| | N79Q) | KGFYPSDIAVEWESNGQPENNYKTTPPVLD | |
| | | SDGSFFLYSKLTVDKSRWQQGNVFSCSVMHE | |
| | | ALHNHYTQKSLSLSPGGGSSPPGGGSSGGGSG | |
| | | PSGSPGNWVNVISDLKKIEDLIQSMHIDATLY | |
| | | TESDVHPSCKVTAMKCFLLELQVISLESGDASI | |
| | | HDTVENLIILAQNSLSSNGQVTESGCKECEEL | |
| | | EEKNIKEFLQSFVHIVQMFINTS | |
| AK930 | 1^{st} polypeptide | DKTHTCPPCPAPELLGGPSVFLFPPKPKDTLMISRTPE | DNA440 |
| | chain: | VTCVVVDVSHEDPEVKFNWYVDGVEVHNAKTKPRE | |
| | FC(Hole) | EQYASTYRVVSVLTVLHQDWLNGKEYKCKVSNKAL | |
| | CD122(C122S, | PAPIEKTISKAKGQPREPQVCTLPPSRDELTKNQVSLS | |
| | C168S) | CAVKGFYPSDIAVEWESNGQPENNYKTTPPVLDSDG | |
| | | SFFLVSKLTVDKSRWQQGNVFSCSVMHEALHNHYTQ | |
| | | KSLSLSPGPGSGSAVNGTSQFTCFYNSRANISCVWSQ | |
| | | DGALQDTSCQVHAWPDRRRWNQTCELLPVSQASW | |
| | | ACNLILGAPDSQKLTTVDIVTLRVLCREGVRWRVMA | |
| | | IQDFKPFENLRLMAPISLQVVHVETHRSNISWEISQAS | |
| | | HYFERHLEFEARTLSPGHTWEEAPLLTLKQKQEWIS | |
| | | LETLTPDTQYEFQVRVKPLQGEFTTWSPWSQPLAF | |
| | | RTKPAALGKD | |
| | 2^{nd} polypeptide | DKTHTCPPCPAPELLGGPSVFLFPPKPKDTLMISR | DNA922 |
| | chain: | TPEVTCVVVDVSHEDPEVKFNWYVDGVEVHNA | |
| | Fc(knob)- | KTKPREEQYASTYRVVSVLTVLHQDWLNGKEY | |
| | [ISSGLLSGRS]- | KCKVSNKALPAPIEKTISKAKGQPREPQVYTLPP | |
| | IL15 | CRDELTKNQVSLWCLVKGFYPSDIAVEWESNGQ | |
| | (N71Q, N79Q) | PENNYKTTPPVLDSDGSFFLYSKLTVDKSRWQQ | |
| | *cleavable | GNVFSCSVMHEALHNHYTQKSLSLSPGGGSSGGS | |
| | peptide bolded | PISSGLLSGRSSGPGSGSNWVNVISDLKKIEDLIQSMH | |
| | | IDATLYTESDVHPSCKVTAMKCFLLELQVISLESGDA | |
| | | SIHDTVENLIILAQNSLSSNGQVTESGCKECEELE | |
| | | EKNIKEFLQSFVHIVQMFINTS | |
| AK936 | 1^{st} polypeptide | DKTHTCPPCPAPELLGGPSVFLFPPKPKDTLMISRTP | DNA823 |
| | chain: | EVTCVVVDVSHEDPEVKFNWYVDGVEVHNAKTK | |
| | Fc(hole)- | PREEQYASTYRVVSVLTVLHQDWLNGKEYKCKVS | |
| | [ISSGLLSGRS]- | NKALPAPIEKTISKAKGQPREPQVCTLPPSRDELTKN | |
| | CD122 | QVSLSCAVKGFYPSDIAVEWESNGQPENNYKTTPPV | |
| | | LDSDGSFFLVSKLTVDKSRWQQGNVFSCSVMHEAL | |
| | | HNHYTQKSLSLSPGGPPSGSSPISSGLLSGRSSGGGAV | |
| | | NGTSQFTCFYNSRANISCVWSQDGALQDTSCQVHAW | |
| | | PDRRRWNQTCELLPVSQASWACNLILGAPDSQKLT | |
| | | TVDIVTLRVLCREGVRWRVMAIQDFKPFENLRLMA | |
| | | PISLQVVHVETHRSNISWEISQASHYFERHLEFEAR | |
| | | TLSPGHTWEEAPLLTLKQKQEWISLETLTPDTQYE | |
| | | FQVRVKPLQGEFTTWSPWSQPLAFRTKPAALGKD | |
| | 2^{nd} polypeptide | DKTHTCPPCPAPELLGGPSVFLFPPKPKDTL | DNA904 |
| | chain: | MISRTPEVTCVVVDVSHEDPEVKFNWYVD | |
| | Fc(knob)-IL15 | GVEVHNAKTKPREEQYASTYRVVSVLTVL | |
| | V1 Non- | HQDWLNGKEYKCKVSNKALPAPIEKTISKA | |
| | cleavable (N71Q, | KGQPREPQVYTLPPCRDELTKNQVSLWCLV | |
| | N79Q) | KGFYPSDIAVEWESNGQPENNYKTTPPVLD | |
| | | SDGSFFLYSKLTVDKSRWQQGNVFSCSVMHE | |
| | | ALHNHYTQKSLSLSPGGGSSPPGGGSSGGGSG | |
| | | PSGSPGNWVNVISDLKKIEDLIQSMHIDATLY | |
| | | TESDVHPSCKVTAMKCFLLELQVISLESGDASI | |
| | | HDTVENLIILAQNSLSSNGQVTESGCKECEEL | |
| | | EEKNIKEFLQSFVHIVQMFINTS | |

[0825] Importantly, AK932 and AK930, and their ‘flipped’ counterparts AK938 and AK936 include a peptide substrate (the sequence of which is depicted in the box above each molecule and bolded in the sequence table table). AK904 is a non-cleavable unmasked construct, and AK910 is a non-cleavable masked construct, both acting as negative controls.

[0826] The above AK molecules include an IL-15 domain, however it will be appreciated that however the results and conclusions of this data are equally relevant for IL-2 constructs.

[0827] Cleavage was Achieved for Masked Constructs Including a Peptide Substrate.

[0828] Constructs were incubated with MMP7, 9 and 10. Cleavage for each construct was analysed by SDS-PAGE and confirmed by HEK-Blue IL-2 bioassay.

[0829] The HEK-Blue assay was carried out as follows:

[0830] Conditions: Cell plate: 96 well plate. Cell density: 50K cls/well. Time point for HEK Blue detection were tested: 1h. Construct number: Total 14 constructs that were tested.

[0831] The results are shown in the table below, where a ‘X’ indicates not fully cleaved and a ‘ ’ indicates cleavage:

| ID | MMP | Cleavage |
|---|---|---|
| AK904 | 7 | X |
| | 9 | X |
| | 10 | X |
| AK910 | 7 | X |
| | 9 | X |
| | 10 | X |
| AK932 | 7 | |
| | 9 | — |
| | 10 | — |
| AK938 | 7 | |
| | 9 | — |
| | 10 | — |
| AK930 | 7 (36 hr) | |
| | 9 | — |
| | 10 | — |
| AK936 | 7 | |
| | 9 | — |
| | 10 | — |

[0832] The specific EC₅₀ readout results from the HEK-Blue IL-2 bioassay are shown in the table below.

| ID | MMP | EC50 (pM) | Max |
|---|---|---|---|
| AK904 (1:1:2) | — | 14.78 | 1.44 |
| | 7 | 17.08 | 1.37 |
| | 9 | 16.00 | 1.43 |
| | 10 | 22.93 | 1.45 |
| AK910 (1:1:2) | — | 1219.34 | 1.31 |
| | 7 | 284.17 | 1.42 |
| | 9 | 519.09 | 1.40 |
| | 10 | 490.52 | 1.40 |
| AK932 (1:1:2) | — | 2403.11 | 1.22 |
| | 7 | 9.30 | 1.43 |
| | 9 | — | — |
| | 10 | — | — |
| AK938 (1:1:2) | — | 885.13 | 1.31 |
| | 7 | 18.03 | 1.38 |
| | 9 | — | — |
| | 10 | — | — |
| AK930 (1:1:2) | — | 1858.76 | 1.22 |
| | 7 | 8.00 | 1.41 |
| | 9 | — | — |
| | 10 | — | — |
| AK936 (1:1:2) | — | 785.85 | 1.37 |
| | 7 | 16.11 | 1.40 |
| | 9 | — | — |
| | 10 | — | — |

[0833] The SDS-PAGE gel results are shown in FIGS. 44A-D. The HEK-Blue IL-2 bioassay results are shown in FIGS. 45A-F.

[0834] The present invention is not intended to be limited in scope to the particular disclosed embodiments, which are provided, for example, to illustrate various aspects of the invention. Various modifications to the compositions and methods described will become apparent from the description and teachings herein. Such variations may be practiced without departing from the true scope and spirit of the disclosure and are intended to fall within the scope of the present disclosure.

### 12. SEQUENCES

| | NEW | | |
|---|---|---|---|
| | SEQ | Exemplary | |
| | ID | AK | |
| DESCRIPTION | NO. | number | AMINO ACID SEQUENCE |
| IL-2 precursor | 1 | | MYRMQLLSCIALSLALVTNSAPTSSSTKKTQLQLEHLLLDLQMILNGIN |
| | | | NYKNPKLTRMLTFKFYMPKKATELKHLQCLEEELKPLEEVLNLAQSKNFHL |
| | | | RPRDLISNINVIVLELKGSETTFMCEYADETATIVEFLNRWITFCQSIISTLT |
| IL-2 mature | 2 | | APTSSSTKKTQLQLEHLLLDLQMILNGINNYKNPKLTRMLTFKFYMPKK |
| | | | ATELKHLQCLEEELKPLEEVLNLAQSKNFHLRPRDLISNINVIVLELKGSE |
| | | | TTFMCEYADETATIVEFLNRWITFCQSIISTLT |
| IL-2 (R38A, F42A, | 3 | AK168 | APTSSSTKKTQLQLEHLLLDLQMILNGINNYKNPKLTAMLTAKFAMPKK |
| Y45A, E62A, | | AK209 | ATELKHLQCLEEALKPLEEVLNLAQSKNFHLRPRDLISNINVIVLELKGSE |
| C125A) | | AK191 | TTFMCEYADETATIVEFLNRWITFAQSIISTLT |
| | | AK197 | |
| | | AK203 | |
| | | AK471 | |
| | | AK442 | |
| | | AK438 | |
| | | AK341 | |
| | | AK530 | |
| | | AK539 | |
| | | AK540 | |
| | | AK541 | |
| | | AK523 | |
| | | AK524 | |
| | | AK525 | |
| MM | 4 | AK168 | AVNGTSQFTCFYNSRANISCVWSQDGALQDTSCQVHAWPDRRRWNQT |
| | | AK209 | CELLPVSQASWACNLILGAPDSQKLTTVDIVTLRVLCREGVRWRVMAIQ |
| | | AK191 | DFKPFENLRLMAPISLQVVHVETHRCNISWEISQASHYFERHLEFEARTLS |
| | | AK197 | PGHTWEEAPLLTLKQKQEWICLETLTPDTQYEFQVRVKPLQGEFTTWSP |
| | | AK203 | WSQPLAFRTKPAALGKD |
| | | AK471 | |
| | | AK442 | |
| | | AK438 | |
| | | AK539 | |
| | | AK540 | |
| | | AK541 | |
| | | AK523 | |
| | | AK524 | |
| | | AK525 | |
| MM (C122S, | 5 | AK341 | AVNGTSQFTCFYNSRANISCVWSQDGALQDTSCQVHAWPDRRRWNQT |
| C168S) | | AK530 | CELLPVSQASWACNLILGAPDSQKLTTVDIVTLRVLCREGVRWRVMAIQ |
| | | | DFKPFENLRLMAPISLQVVHVETHRSNISWEISQASHYFERHLEFEARTLS |
| | | | PGHTWEEAPLLTLKQKQEWISLETLTPDTQYEFQVRVKPLQGEFTTWSP |
| | | | WSQPLAFRTKPAALGKD |
| Parent | 6 | | ASTKGPSVFPLAPSSKSTSGGTAALGCLVKDYFPEPVTVSWNSGALTSGVHTFPAVLQSS |
| IgG1_human heavy | | | GLYSLSSVVTVPSSSLGTQTYICNVNHKPSNTKVDKKVEPKSCDKTHTCPPCPAPELLGG |
| chain constant | | | PSVFLFPPKPKDTLMISRTPEVTCVVVDVSHEDPEVKFNWYVDGVEVHNAKTKPREEQYN |
| gamma 1 | | | STYRVVSVLTVLHQDWLNGKEYKCKVSNKALPAPIEKTISKAKGQPREPQVYTLPPSRDE |
| | | | LTKNQVSLTCLVKGFYPSDIAVEWESNGQPENNYKTTPPVLDSDGSFFLYSKLTVDKSRW |
| | | | QQGNVFSCSVMHEALHNHYTQKSLSLSPGK |
| Parent | 7 | | DKTHTCPPCPAPELLGG |
| IgG1_human heavy | | | PSVFLFPPKPKDTLMISRTPEVTCVVVDVSHEDPEVKFNWYVDGVEVHNAKTKPREEQYN |
| chain constant | | | STYRVVSVLTVLHQDWLNGKEYKCKVSNKALPAPIEKTISKAKGQPREPQVYTLPPSRDE |
| gamma 1 - Fc | | | LTKNQVSLTCLVKGFYPSDIAVEWESNGQPENNYKTTPPVLDSDGSFFLYSKLTVDKSRW |
| domain | | | QQGNVFSCSVMHEALHNHYTQKSLSLSPG |
| HL1 (Y349C, | 8 | | DKTHTCPPCPAPELLGGPSVFLFPPKPKDTLMISRTPEVTCVVVDVSHE |
| T366S, L38A, | | | DPEVKFNWYVDGVEVHNAKTKPREEQYNSTYRVVSVLTVLHQDWL |
| Y407V) | | | NGKEYKCKVSNKALPAPIEKTISKAKGQPREPQVCTLPPSRDELTKNQ |
| | | | VSLSCAVKGFYPSDIAVEWESNGQPENNYKTTPPVLDSDGSFFLVSKL |
| | | | TVDKSRWQQGNVFSCSVMHEALHNHYTQKSLSLSPG |
| HL1 | 9 | AK168 | DKTHTCPPCPAPELLGGPSVFLFPPKPKDTLMISRTPEVTCVVVDVSHE |
| (Y349C, T366S, | | AK209 | DPEVKFNWYVDGVEVHNAKTKPREEQYASTYRVVSVLTVLHQDWL |
| L38A, Y407V, | | AK191 | NGKEYKCKVSNKALPAPIEKTISKAKGQPREPQVCTLPPSRDELTKNQ |
| N297A) | | AK197 | VSLSCAVKGFYPSDIAVEWESNGQPENNYKTTPPVLDSDGSFFLVSKL |
| | | AK203 | TVDKSRWQQGNVFSCSVMHEALHNHYTQKSLSLSPG |
| | | AK442 | |
| | | AK438 | |
| | | AK341 | |
| | | AK530 | |
| | | AK539 | |
| | | AK540 | |
| | | AK541 | |
| | | AK523 | |
| | | AK524 | |
| | | AK525 | |
| HL1 | 10 | AK471 | DKTHTCPPCPAPELLGGPSVFLFPPKPKDTLMASRTPEVTCVVVDVSHEDP |
| (Y349C, T366S, | | | EVKFNWYVDGVEVHNAKTKPREEQYASTYRVVSVLTVLHQDWLNGKE |
| L38A, Y407V, | | | YKCKVSNKALPAPIEKTISKAKGQPREPQVCTLPPSRDELTKNQVSLSCA |
| N297A, I253A) | | | VKGFYPSDIAVEWESNGQPENNYKTTPPVLDSDGSFFLVSKLTVDKSRW |
| | | | QQGNVFSCSVMHEALHNHYTQKSLSLSPG |
| HL2 (S354C, | 11 | | DKTHTCPPCPAPELLGGPSVFLFPPKPKDTLMISRTPEVTCVVVDVSH |
| T366W) | | | EDPEVKFNWYVDGVEVHNAKTKPREEQYNSTYRVVSVLTVLHQDW |
| | | | LNGKEYKCKVSNKALPAPIEKTISKAKGQPREPQVYTLPPCRDELTK |
| | | | NQVSLWCLVKGFYPSDIAVEWESNGQPENNYKTTPPVLDSDGSFFL |
| | | | YSKLTVDKSRWQQGNVFSCSVMHEALHNHYTQKSLSLSPGK |
| HL2 | 12 | AK168 | DKTHTCPPCPAPELLGGPSVFLFPPKPKDTLMISRTPEVTCVVVDVSH |
| (S354C, T366W, | | AK209 | EDPEVKFNWYVDGVEVHNAKTKPREEQYASTYRVVSVLTVLHQDW |
| N297A) | | AK191 | LNGKEYKCKVSNKALPAPIEKTISKAKGQPREPQVYTLPPCRDELTK |
| | | AK197 | NQVSLWCLVKGFYPSDIAVEWESNGQPENNYKTTPPVLDSDGSFFL |
| | | AK203 | YSKLTVDKSRWQQGNVFSCSVMHEALHNHYTQKSLSLSPG |
| | | AK442 | |
| | | AK438 | |
| | | AK341 | |
| | | AK530 | |
| | | AK539 | |
| | | AK540 | |
| | | AK541 | |
| | | AK523 | |
| | | AK524 | |
| | | AK525 | |
| HL2 | 13 | AK471 | DKTHTCPPCPAPELLGGPSVFLFPPKPKDTLMASRTPEVTCVVVDVSHEDP |
| (S354C, T366W, | | | EVKFNWYVDGVEVHNAKTKPREEQYASTYRVVSVLTVLHQDWLNGKEY |
| N297A, I253A) | | | KCKVSNKALPAPIEKTISKAKGQPREPQVYTLPPCRDELTKNQVSLWCLVK |
| | | | GFYPSDIAVEWESNGQPENNYKTTPPVLDSDGSFFLYSKLTVDKSRW |
| | | | QQGNVFSCSVMHEALHNHYTQKSLSLSPG |
| 1^{st} linker L1 | 14 | AK168 | PGSGS |
| (non-cleavable) | | AK209 | |
| | | AK191 | |
| | | AK197 | |
| | | AK203 | |
| | | AK471 | |
| | | AK341 | |
| | | AK539 | |
| | | AK540 | |
| | | AK541 | |
| 1^{st} linker L1 | 15 | AK442 | GPPSGSSPGDSGGFMLTSGGG |
| (cleavable) | | | |
| 1^{st} linker L1 | 16 | AK438 | GPPSGSSPGVPLSLYGSGGG |
| (cleavable) | | | |
| 1^{st} linker L1 | 17 | AK530 | GPPSGSSPMPYDLYHPSGGG |
| (cleavable) | | | |
| 1^{st} linker L1 | 112 | AK523 | GSPDLLAVVAASSGP |
| (cleavable) | | | |
| 1^{st} linker L1 | 113 | AK524 | GSPGDLLAVVAASSGP |
| (cleavable) | | | |
| 1^{st} linker L1 | 114 | AK525 | GSGSPSDLLAVVAASSGP |
| (cleavable) | | | |
| 2^{nd} linker L2 | 18 | AK168 | GGSSPPMPYDLYHPSGP |
| (cleavable) | | | |
| 2^{nd} linker L2 | 19 | AK209 | GSPGVPLSLYSGP |
| (cleavable) | | AK471 | |
| | | AK341 | |
| 2^{nd} linker L2 | 20 | AK191 | GGSGRAAAVKSPSGP |
| (cleavable) | | | |
| 2^{nd} linker L2 | 21 | AK197 | GGSGHEQLTVSGP |
| (cleavable) | | | |
| 2^{nd} linker L2 | 22 | AK203 | GSGPDSGGFMLTSGP |
| (cleavable) | | | |
| 2^{nd} linker L2 | 23 | AK442 | GGSSPPGGGSSGGGSGP |
| (non-cleavable) | | AK438 | |
| | | AK530 | |
| | | AK523 | |
| | | AK524 | |
| | | AK525 | |
| 2^{nd} linker L2 | 115 | AK539 | GGPSDLLAVVAASSGP |
| (cleavable) | | | |
| 2^{nd} linker L2 | 116 | AK540 | GSGPSDLLAVVAASSGP |
| (cleavable) | | | |
| 2^{nd} linker L2 | 117 | AK541 | GSSGGPDLLAVVAASSGP |
| (cleavable) | | | |
| Cleavable peptide | 24 | AK168 | MPYD*LYHP |
| | | AK530 | * indicates cleavage site |
| Cleavable peptide | 25 | AK203 | DSGG*FMLT |
| | | AK442 | * indicates cleavage site |
| Cleavable peptide | 26 | AK197 | HEQ*LTV |
| | | | * indicates cleavage site |
| Cleavable peptide | 27 | AK191 | RAAA*VKSP |
| | | | * indicates cleavage site |
| Cleavable peptide | 28 | AK209 | VPLS*LY |
| | | AK471 | * indicates cleavage site |
| | | AK341 | |
| | | AK438 | |
| Cleavable peptide | 118 | AK50 | DLLA*VVAAS |
| | | AK539 | * indicates cleavage site |
| | | AK540 | |
| | | AK541 | |
| | | AK523 | |
| | | AK524 | |
| | | AK525 | |
| Cleavable peptide | 119 | AK88 | ISSGLL*SG*RS |
| | | | * indicates cleavage site |
| C terminal spacer | 29 | AK168 | SGP |
| domain | | AK209 | |
| | | AK191 | |
| | | AK197 | |
| | | AK203 | |
| | | AK471 | |
| | | AK348 | |
| | | AK539 | |
| | | AK540 | |
| | | AK541 | |
| | | AK523 | |
| | | AK524 | |
| | | AK525 | |
| C terminal spacer | 30 | AK442 | SGGG |
| domain | | AK530 | |
| C terminal spacer | 31 | AK438 | GSGGG |
| domain | | | |
| N terminal spacer | 32 | AK168 | GGSSPP |
| domain | | | |
| N terminal spacer | 33 | AK203 | GSGP |
| domain | | | |
| N terminal spacer | 34 | AK209 | GSPG |
| domain | | AK341 | |
| | | AK471 | |
| | | AK524 | |
| N terminal spacer | 35 | AK191 | GGSG |
| domain | | AK197 | |
| N terminal spacer | 36 | AK442 | GPPSGSSPG |
| domain | | AK348 | |
| N terminal spacer | 37 | AK530 | GPPSGSSP |
| domain | | | |
| N terminal spacer | 120 | AK539 | GGPS |
| domain | | | |
| N terminal spacer | 121 | AK540 | GSGPS |
| domain | | | |
| N terminal spacer | 122 | AK541 | GSSGGP |
| domain | | | |
| N terminal spacer | 123 | AK523 | GSP |
| domain | | | |
| N terminal spacer | 124 | AK525 | GSGSPS |
| domain | | | |
| 1^{st} polypeptide | 38 | AK168 | DKTHTCPPCPAPELLGGPSVFLFPPKPKDTLMISRTPEVTCVVVDVSHE |
| chain - A | | AK191 | DPEVKFNWYVDGVEVHNAKTKPREEQYASTYRVVSVLTVLHQDWL |
| (HL1-L1-MM) | | AK197 | NGKEYKCKVSNKALPAPIEKTISKAKGQPREPQVCTLPPSRDELTKN |
| | | AK203 | QVSLSCAVKGFYPSDIAVEWESNGQPENNYKTTPPVLDSDGSFFLV |
| | | AK209 | SKLTVDKSRWQQGNVFSCSVMHEALHNHYTQKSLSLSPGPGSGSA |
| | | AK539 | VNGTSQFTCFYNSRANISCVWSQDGALQDTSCQVHAWPDRRRWN |
| | | AK540 | QTCELLPVSQASWACNLILGAPDSQKLTTVDIVTLRVLCREGVRWR |
| | | AK541 | VMAIQDFKPFENLRLMAPISLQVVHVETHRCNISWEISQASHYFERHL |
| | | | EFEARTLSPGHTWEEAPLLTLKQKQEWICLETLTPDTQYEFQVRVKP |
| | | | LQGEFTTWSPWSQPLAFRTKPAALGKD |
| 1^{st} polypeptide | 39 | AK341 | DKTHTCPPCPAPELLGGPSVFLFPPKPKDTLMISRTPEVTCVVVDVSHEDP |
| chain - B | | | EVKFNWYVDGVEVHNAKTKPREEQYASTYRVVSVLTVLHQDWLNGKE |
| (HL1-L1-MM) | | | YKCKVSNKALPAPIEKTISKAKGQPREPQVCTLPPSRDELTKNQVSLSCA |
| | | | VKGFYPSDIAVEWESNGQPENNYKTTPPVLDSDGSFFLVSKLTVDKSRWQ |
| | | | QGNVFSCSVMHEALHNHYTQKSLSLSPGPGSGSAVNGTSQFTCFYNSRAN |
| | | | ISCVWSQDGALQDTSCQVHAWPDRRRWNQTCELLPVSQASWACNLILGAP |
| | | | DSQKLTTVDIVTLRVLCREGVRWRVMAIQDFKPFENLRLMAPISLQVVHVE |
| | | | THRSNISWEISQASHYFERHLEFEARTLSPGHTWEEAPLLTLKQKQEWISLETL |
| | | | TPDTQYEFQVRVKPLQGEFTTWSPWSQPLAFRTKPAALGKD |
| 1^{st} polypeptide | 40 | AK530 | DKTHTCPPCPAPELLGGPSVFLFPPKPKDTLMISRTPEVTCVVVDVSH |
| chain - C | | | EDPEVKFNWYVDGVEVHNAKTKPREEQYASTYRVVSVLTVLHQDW |
| (HL1-L1-MM) | | | LNGKEYKCKVSNKALPAPIEKTISKAKGQPREPQVCTLPPSRDELTKNQ |
| | | | VSLSCAVKGFYPSDIAVEWESNGQPENNYKTTPPVLDSDGSFFLVSKLT |
| | | | VDKSRWQQGNVFSCSVMHEALHNHYTQKSLSLSPGGPPSGSSPMPYD |
| | | | LYHPSGGGAVNGTSQFTCFYNSRANISCVWSQDGALQDTSCQVHAWP |
| | | | DRRRWNQTCELLPVSQASWACNLILGAPDSQKLTTVDIVTLRVLCREG |
| | | | VRWRVMAIQDFKPFENLRLMAPISLQVVHVETHRSNISWEISQASHYFER |
| | | | HLEFEARTLSPGHTWEEAPLLTLKQKQEWISLETLTPDTQYEFQVRVKPL |
| | | | QGEFTTWSPWSQPLAFRTKPAALGKD |
| 1^{st} polypeptide | 41 | AK442 | DKTHTCPPCPAPELLGGPSVFLFPPKPKDTLMISRTPEVTCVVVDVSHEDPEVKFN |
| chain - D | | | WYVDGVEVHNAKTKPREEQYASTYRVVSVLTVLHQDWLNGKEYKCKVSNKAL |
| (HL1-L1-MM) | | | PAPIEKTISKAKGQPREPQVCTLPPSRDELTKNQVSLSCAVKGFYPSDIAVEWESN |
| | | | GQPENNYKTTPPVLDSDGSFFLVSKLTVDKSRWQQGNVFSCSVMHEALHNHYT |
| | | | QKSLSLSPGGPPSGSSPGDSGGFMLTSGGGAVNGTSQFTCFYNSRANISCVWSQD |
| | | | GALQDTSCQVHAWPDRRRWNQTCELLPVSQASWACNLILGAPDSQKLTTVDIV |
| | | | TLRVLCREGVRWRVMAIQDFKPFENLRLMAPISLQVVHVETHRCNISWEISQAS |
| | | | HYFERHLEFEARTLSPGHTWEEAPLLTLKQKQEWICLETLTPDTQYEFQVRVKP |
| | | | LQGEFTTWSPWSQPLAFRTKPAALGKD |
| 1^{st} polypeptide | 42 | AK438 | DKTHTCPPCPAPELLGGPSVFLFPPKPKDTLMISRTPEVTCVVVDVSHEDPEVKFNW |
| chain - E | | | YVDGVEVHNAKTKPREEQYASTYRVVSVLTVLHQDWLNGKEYKCKVSNKALPAP |
| (HL1-L1-MM) | | | IEKTISKAKGQPREPQVCTLPPSRDELTKNQVSLSCAVKGFYPSDIAVEWESNGQPE |
| | | | NNYKTTPPVLDSDGSFFLVSKLTVDKSRWQQGNVFSCSVMHEALHNHYTQKSLSL |
| | | | SPGGPPSGSSPGVPLSLYGSGGGAVNGTSQFTCFYNSRANISCVWSQDGALQDTSC |
| | | | QVHAWPDRRRWNQTCELLPVSQASWACNLILGAPDSQKLTTVDIVTLRVLCREGV |
| | | | RWRVMAIQDFKPFENLRLMAPISLQVVHVETHRCNISWEISQASHYFERHLEFEART |
| | | | LSPGHTWEEAPLLTLKQKQEWICLETLTPDTQYEFQVRVKPLQGEFTTWSPWSQPL |
| | | | AFRTKPAALGKD |
| 1^{st} polypeptide | 43 | AK471 | DKTHTCPPCPAPELLGGPSVFLFPPKPKDTLMASRTPEVTCVVVDVSHEDP |
| chain - G | | | EVKFNWYVDGVEVHNAKTKPREEQYASTYRVVSVLTVLHQDWLNGKE |
| (HL-L2-C) | | | YKCKVSNKALPAPIEKTISKAKGQPREPQVCTLPPSRDELTKNQVSLSCA |
| | | | VKGFYPSDIAVEWESNGQPENNYKTTPPVLDSDGSFFLVSKLTVDKSRW |
| | | | QQGNVFSCSVMHEALHNHYTQKSLSLSPGPGSGSAVNGTSQFTCFYNSRA |
| | | | NISCVWSQDGALQDTSCQVHAWPDRRRWNQTCELLPVSQASWACNLILG |
| | | | APDSQKLTTVDIVTLRVLCREGVRWRVMAIQDFKPFENLRLMAPISLQVVH |
| | | | VETHRCNISWEISQASHYFERHLEFEARTLSPGHTWEEAPLLTLKQKQEWIC |
| | | | LETLTPDTQYEFQVRVKPLQGEFTTWSPWSQPLAFRTKPAALGKD |
| 1^{st} polypeptide | 44 | AK252 | DKTHTCPPCPAPELLGGPSVFLFPPKPKDTLMISRTPEVTCVVVDVSHEDPE |
| chain - H | | | VKFNWYVDGVEVHNAKTKPREEQYASTYRVVSVLTVLHQDWLNGKEYK |
| (HL-L2-C) | | | CKVSNKALPAPIEKTISKAKGQPREPQVCTLPPSRDELTKNQVSLSCAVKGF |
| | | | YPSDIAVEWESNGQPENNYKTTPPVLDSDGSFFLVSKLTVDKSRWQQGNVF |
| | | | SCSVMHEALHNHYTQKSLSLSPGGPPSGSSPMPYDLYHPSGGGAVNGTSQF |
| | | | TCFYNSRANISCVWSQDGALQDTSCQVHAWPDRRRWNQTCELLPVSQASW |
| | | | ACNLILGAPDSQKLTTVDIVTLRVLCREGVRWRVMAIQDFKPFENLRLM |
| | | | APISLQVVHVETHRCNISWEISQASHYFERHLEFEARTLSPGHTWEEA |
| | | | PLLTLKQKQEWICLETLTPDTQYEFQVRVKPLQGEFTTWSPWSQPLAFRTKPAALGKD |
| 1^{st} polypeptide | 125 | AK523 | DKTHTCPPCPAPELLGGPSVFLFPPKPKDTLMISRTPEVTCVVVDVSHEDPEVKFNW |
| chain - I | | | YVDGVEVHNAKTKPREEQYASTYRVVSVLTVLHQDWLNGKEYKCKVSNKALP |
| (HL-L1-MM) | | | APIEKTISKAKGQPREPQVCTLPPSRDELTKNQVSLSCAVKGFYPSDIAVEWESNG |
| | | | QPENNYKTTPPVLDSDGSFFLVSKLTVDKSRWQQGNVFSCSVMHEALHNHYTQK |
| | | | SLSLSPGGSPDLLAVVAASSGPAVNGTSQFTCFYNSRANISCVWSQDGALQDTSC |
| | | | QVHAWPDRRRWNQTCELLPVSQASWACNLILGAPDSQKLTTVDIVTLRVLCREG |
| | | | VRWRVMAIQDFKPFENLRLMAPISLQVVHVETHRCNISWEISQASHYFERHLEFE |
| | | | ARTLSPGHTWEEAPLLTLKQKQEWICLETLTPDTQYEFQVRVKPLQGEFTTWSPW |
| | | | SQPLAFRTKPAALGKD |
| 1^{st} polypeptide | 126 | AK524 | DKTHTCPPCPAPELLGGPSVFLFPPKPKDTLMISRTPEVTCVVVDVSHEDPEVKFNW |
| chain - J | | | YVDGVEVHNAKTKPREEQYASTYRVVSVLTVLHQDWLNGKEYKCKVSNKALPAPI |
| (HL-L1-MM) | | | EKTISKAKGQPREPQVCTLPPSRDELTKNQVSLSCAVKGFYPSDIAVEWESNGQPENNY |
| | | | KTTPPVLDSDGSFFLVSKLTVDKSRWQQGNVFSCSVMHEALHNHYTQKSLSLSPGGS |
| | | | PGDLLAVVAASSGPAVNGTSQFTCFYNSRANISCVWSQDGALQDTSCQVHAWPDRR |
| | | | RWNQTCELLPVSQASWACNLILGAPDSQKLTTVDIVTLRVLCREGVRWRVMAIQDFKP |
| | | | FENLRLMAPISLQVVHVETHRCNISWEISQASHYFERHLEFEARTLSPGHTWEEAPLLT |
| | | | LKQKQEWICLETLTPDTQYEFQVRVKPLQGEFTTWSPWSQPLAFRTKPAALGKD |
| 1^{st} polypeptide | 127 | AK525 | DKTHTCPPCPAPELLGGPSVFLFPPKPKDTLMISRTPEVTCVVVDVSHEDPEVKFNWYVD |
| chain - K | | | GVEVHNAKTKPREEQYASTYRVVSVLTVLHQDWLNGKEYKCKVSNKALPAPIEKTISK |
| (HL-L1-MM) | | | AKGQPREPQVCTLPPSRDELTKNQVSLSCAVKGFYPSDIAVEWESNGQPENNYKTTPPV |
| | | | LDSDGSFFLVSKLTVDKSRWQQGNVFSCSVMHEALHNHYTQKSLSLSPGSGSPSDLLAV |
| | | | VAASSGPAVNGTSQFTCFYNSRANISCVWSQDGALQDTSCQVHAWPDRRRWNQTCELL |
| | | | PVSQASWACNLILGAPDSQKLTTVDIVTLRVLCREGVRWRVMAIQDFKPFENLRLMAPISL |
| | | | QVVHVETHRCNISWEISQASHYFERHLEFEARTLSPGHTWEEAPLLTLKQKQEWICLE |
| | | | TLTPDTQYEFQVRVKPLQGEFTTWSPWSQPLAFRTKPAALGKD |
| 2^{nd} polypeptide | 45 | AK168 | DKTHTCPPCPAPELLGGPSVFLFPPKPKDTLMISRTPEVTCVVVDVS |
| chain - A | | | HEDPEVKFNWYVDGVEVHNAKTKPREEQYASTYRVVSVLTVLHQ |
| (HL-L2-C) | | | DWLNGKEYKCKVSNKALPAPIEKTISKAKGQPREPQVYTLPPCRD |
| | | | ELTKNQVSLWCLVKGFYPSDIAVEWESNGQPENNYKTTPPVLDSD |
| | | | GSFFLYSKLTVDKSRWQQGNVFSCSVMHEALHNHYTQKSLSLSPG |
| | | | GGSSPPMPYDLYHPSGPAPTSSSTKKTQLQLEHLLLDLQMILNGINN |
| | | | YKNPKLTAMLTAKFAMPKKATELKHLQCLEEALKPLEEVLNLAQ |
| | | | SKNFHLRPRDLISNINVIVLELKGSETTFMCEYADETATIVEFLNRW |
| | | | ITFAQSIISTLT |
| 2^{nd} polypeptide | 46 | AK191 | DKTHTCPPCPAPELLGGPSVFLFPPKPKDTLMISRTPEVTCVVVDVS |
| chain - B | | | HEDPEVKFNWYVDGVEVHNAKTKPREEQYASTYRVVSVLTVLHQ |
| (HL-L2-C) | | | DWLNGKEYKCKVSNKALPAPIEKTISKAKGQPREPQVYTLPPCRDE |
| | | | LTKNQVSLWCLVKGFYPSDIAVEWESNGQPENNYKTTPPVLDSDGS |
| | | | FFLYSKLTVDKSRWQQGNVFSCSVMHEALHNHYTQKSLSLSPGGG |
| | | | SGRAAAVKSPSGPAPTSSSTKKTQLQLEHLLLDLQMILNGINNYKN |
| | | | PKLTAMLTAKFAMPKKATELKHLQCLEEALKPLEEVLNLAQSKNF |
| | | | HLRPRDLISNINVIVLELKGSETTFMCEYADETATIVEFLNRWITFAQ |
| | | | SIISTLT |
| 2^{nd} polypeptide | 47 | AK197 | DKTHTCPPCPAPELLGGPSVFLFPPKPKDTLMISRTPEVTCVVVDVS |
| chain - C | | | HEDPEVKFNWYVDGVEVHNAKTKPREEQYASTYRVVSVLTVLHQ |
| (HL-L2-C) | | | DWLNGKEYKCKVSNKALPAPIEKTISKAKGQPREPQVYTLPPCRDE |
| | | | LTKNQVSLWCLVKGFYPSDIAVEWESNGQPENNYKTTPPVLDSDG |
| | | | SFFLYSKLTVDKSRWQQGNVFSCSVMHEALHNHYTQKSLSLSPGG |
| | | | GSGHEQLTVSGPAPTSSSTKKTQLQLEHLLLDLQMILNGINNYKNP |
| | | | KLTAMLTAKFAMPKKATELKHLQCLEEALKPLEEVLNLAQSKNFH |
| | | | LRPRDLISNINVIVLELKGSETTFMCEYADETATIVEFLNRWITFAQS |
| | | | IISTLT |
| 2^{nd} polypeptide | 48 | AK203 | DKTHTCPPCPAPELLGGPSVFLFPPKPKDTLMISRTPEVTCVVVD |
| chain - D | | | VSHEDPEVKFNWYVDGVEVHNAKTKPREEQYASTYRVVSVLT |
| (HL-L2-C) | | | VLHQDWLNGKEYKCKVSNKALPAPIEKTISKAKGQPREPQVYT |
| | | | LPPCRDELTKNQVSLWCLVKGFYPSDIAVEWESNGQPENNYKT |
| | | | TPPVLDSDGSFFLYSKLTVDKSRWQQGNVFSCSVMHEALHNHY |
| | | | TQKSLSLSPGGSGPDSGGFMLTSGPAPTSSSTKKTQLQLEHLLLD |
| | | | LQMILNGINNYKNPKLTAMLTAKFAMPKKATELKHLQCLEEAL |
| | | | KPLEEVLNLAQSKNFHLRPRDLISNINVIVLELKGSETTFMCEYAD |
| | | | ETATIVEFLNRWITFAQSIISTLT |
| 2^{nd} polypeptide | 49 | AK209 | DKTHTCPPCPAPELLGGPSVFLFPPKPKDTLMISRTPEVTCVVVDV |
| chain - E | | AK341 | SHEDPEVKFNWYVDGVEVHNAKTKPREEQYASTYRVVSVLTVL |
| (HL-L2-C) | | | HQDWLNGKEYKCKVSNKALPAPIEKTISKAKGQPREPQVYTLPPC |
| | | | RDELTKNQVSLWCLVKGFYPSDIAVEWESNGQPENNYKTTPPVL |
| | | | DSDGSFFLYSKLTVDKSRWQQGNVFSCSVMHEALHNHYTQKSLS |
| | | | LSPGGSPGVPLSLYSGPAPTSSSTKKTQLQLEHLLLDLQMILNGINN |
| | | | YKNPKLTAMLTAKFAMPKKATELKHLQCLEEALKPLEEVLNLA |
| | | | QSKNFHLRPRDLISNINVIVLELKGSETTFMCEYADETATIVEFLN |
| | | | RWITFAQSIISTLT |
| 2^{nd} polypeptide | 50 | AK471 | DKTHTCPPCPAPELLGGPSVFLFPPKPKDTLMASRTPEVTCVVVDVSHEDP |
| chain - F | | | EVKFNWYVDGVEVHNAKTKPREEQYASTYRVVSVLTVLHQDWLNGKEY |
| (HL-L2-C) | | | KCKVSNKALPAPIEKTISKAKGQPREPQVYTLPPCRDELTKNQVSLWCLVK |
| | | | GFYPSDIAVEWESNGQPENNYKTTPPVLDSDGSFFLYSKLTVDKSRW |
| | | | QQGNVFSCSVMHEALHNHYTQKSLSLSPGGSPGVPLSLYSGP |
| | | | APTSSSTKKTQLQLEHLLLDLQMILNGINNYKNPKLTAMLTAKFAMPKK |
| | | | ATELKHLQCLEEALKPLEEVLNLAQSKNFHLRPRDLISNINVIVLELKGSE |
| | | | TTFMCEYADETATIVEFLNRWITFAQSIISTLT |
| 2^{nd} polypeptide | 51 | AK442 | DKTHTCPPCPAPELLGGPSVFLFPPKPKDTLMISRTPEVTCVVVDVSHEDPEVKFNW |
| chain - G | | AK438 | YVDGVEVHNAKTKPREEQYASTYRVVSVLTVLHQDWLNGKEYKCKVSNKALPAP |
| (HL-L2-C) | | AK530 | IEKTISKAKGQPREPQVYTLPPCRDELTKNQVSLWCLVKGFYPSDIAVEWESNGQPE |
| | | AK252 | NNYKTTPPVLDSDGSFFLYSKLTVDKSRWQQGNVFSCSVMHEALHNHYTQKSLSLS |
| | | AK523 | PGGGSSPPGGGSSGGGSGPAPTSSSTKKTQLQLEHLLLDLQMILNGINNYKNPKLTAM |
| | | AK524 | LTAKFAMPKKATELKHLQCLEEALKPLEEVLNLAQSKNFHLRPRDLISNINVIVLELKG |
| | | AK525 | SETTFMCEYADETATIVEFLNRWITFAQSIISTLT |
| 2^{nd} polypeptide | 128 | AK539 | DKTHTCPPCPAPELLGGPSVFLFPPKPKDTLMISRTPEVTCVVVDVSHEDPEVKFNW |
| chain - H | | | YVDGVEVHNAKTKPREEQYASTYRVVSVLTVLHQDWLNGKEYKCKVSNKALPAPI |
| (HL-L2-C) | | | EKTISKAKGQPREPQVYTLPPCRDELTKNQVSLWCLVKGFYPSDIAVEWESNGQP |
| | | | ENNYKTTPPVLDSDGSFFLYSKLTVDKSRWQQGNVFSCSVMHEALHNHYTQKSLSL |
| | | | SPGGGPSDLLAVVAASSGPAPTSSSTKKTQLQLEHLLLDLQMILNGINNYKNPKLTA |
| | | | MLTAKFAMPKKATELKHLQCLEEALKPLEEVLNLAQSKNFHLRPRDLISNINVIVL |
| | | | ELKGSETTFMCEYADETATIVEFLNRWITFAQSIISTLT |
| 2^{nd} polypeptide | 129 | AK540 | DKTHTCPPCPAPELLGGPSVFLFPPKPKDTLMISRTPEVTCVVVDVSHEDPEVKFNWYV |
| chain - H | | | DGVEVHNAKTKPREEQYASTYRVVSVLTVLHQDWLNGKEYKCKVSNKALPAPIEKTI |
| (HL-L2-C) | | | SKAKGQPREPQVYTLPPCRDELTKNQVSLWCLVKGFYPSDIAVEWESNGQPENNYK |
| | | | TTPPVLDSDGSFFLYSKLTVDKSRWQQGNVFSCSVMHEALHNHYTQKSLSLSPGGSG |
| | | | PSDLLAVVAASSGPAPTSSSTKKTQLQLEHLLLDLQMILNGINNYKNPKLTAMLTAK |
| | | | FAMPKKATELKHLQCLEEALKPLEEVLNLAQSKNFHLRPRDLISNINVIVLELK |
| | | | GSETTFMCEYADETATIVEFLNRWITFAQSIISTLT |
| 2^{nd} polypeptide | 130 | AK541 | DKTHTCPPCPAPELLGGPSVFLFPPKPKDTLMISRTPEVTCVVVDVSHEDPEVKFNW |
| chain - H | | | YVDGVEVHNAKTKPREEQYASTYRVVSVLTVLHQDWLNGKEYKCKVSNKALPAP |
| (HL-L2-C) | | | IEKTISKAKGQPREPQVYTLPPCRDELTKNQVSLWCLVKGFYPSDIAVEWESNGQPEN |
| | | | NYKTTPPVLDSDGSFFLYSKLTVDKSRWQQGNVFSCSVMHEALHNHYTQKSLSLSPG |
| | | | GSSGGPDLLAVVAASSGPAPTSSSTKKTQLQLEHLLLDLQMILNGINNYKNPKLTAMLTA |
| | | | KFAMPKKATELKHLQCLEEALKPLEEVLNLAQSKNFHLRPRDLISNINVIVLELKGSETT |
| | | | FMCEYADETATIVEFLNRWITFAQSIISTLT |
| Cleavage product | 52 | AK168 | LYHPSGPAPTSSSTKKTQLQLEHLLLDLQMILNGINNYKNPKLTA |
| CP | | | MLTAKFAMPKKATELKHLQCLEEALKPLEEVLNLAQSKNFHLR |
| | | | PRDLISNINVIVLELKGSETTFMCEYADETATIVEFLNRWITFAQ |
| | | | SIISTLT |
| Cleavage product | 53 | AK191 | VKSPSGPAPTSSSTKKTQLQLEHLLLDLQMILNGINNYKNPKLT |
| CP | | | AMLTAKFAMPKKATELKHLQCLEEALKPLEEVLNLAQSKNFH |
| | | | LRPRDLISNINVIVLELKGSETTFMCEYADETATIVEFLNRWITFA |
| | | | QSIISTLT |
| Cleavage product | 54 | AK197 | LTVSGPAPTSSSTKKTQLQLEHLLLDLQMILNGINNYKNPKLTA |
| CP | | | MLTAKFAMPKKATELKHLQCLEEALKPLEEVLNLAQSKNFHLR |
| | | | PRDLISNINVIVLELKGSETTFMCEYADETATIVEFLNRWITFAQ |
| | | | SIISTLT |
| Cleavage product | 55 | AK203 | FMLTSGPAPTSSSTKKTQLQLEHLLLDLQMILNGINNYKNPKLT |
| CP | | | AMLTAKFAMPKKATELKHLQCLEEALKPLEEVLNLAQSKNFH |
| | | | LRPRDLISNINVIVLELKGSETTFMCEYADETATIVEFLNRWITF |
| | | | AQSIISTLT |
| Cleavage product | 56 | AK209 | LYSGPAPTSSSTKKTQLQLEHLLLDLQMILNGINNYKNPKLTAM |
| CP | | AK341 | LTAKFAMPKKATELKHLQCLEEALKPLEEVLNLAQSKNFHLR |
| | | AK471 | PRDLISNINVIVLELKGSETTFMCEYADETATIVEFLNRWITFA |
| | | | QSIISTLT |
| Cleavage product | 131 | AK442 | DKTHTCPPCPAPELLGGPSVFLFPPKPKDTLMISRTPEVTCVVVDVSHEDPEVKFNWYVD |
| CP | 132 | | GVEVHNAKTKPREEQYASTYRVVSVLTVLHQDWLNGKEYKCKVSNKALPAPIEKTISK |
| | | | AKGQPREPQVYTLPPCRDELTKNQVSLWCLVKGFYPSDIAVEWESNGQPENNYKTTPPV |
| | | | LDSDGSFFLYSKLTVDKSRWQQGNVFSCSVMHEALHNHYTQKSLSLSPGGGSSPPGGGSS |
| | | | GGGSGPAPTSSSTKKTQLQLEHLLLDLQMILNGINNYKNPKLTAMLTAKFAMPKKATELK |
| | | | HLQCLEEALKPLEEVLNLAQSKNFHLRPRDLISNINVIVLELKGSETTFMCEYADETATIV |
| | | | EFLNRWITFAQSIISTLT; (2^{nd} polypeptide chain - SEQ ID NO: 131) |
| | | | DKTHTCPPCPAPELLGGPSVFLFPPKPKDTLMISRTPEVTCVV |
| | | | VDVSHEDPEVKFNWYVDGVEVHNAKTKPREEQYASTYRVVSVLTVLHQDWLNGKEYK |
| | | | CKVSNKALPAPIEKTISKAKGQPREPQVCTLPPSRDELTKNQVSLSCAVKGFYPSDIAVE |
| | | | WESNGQPENNYKTTPPVLDSDGSFFLVSKLTVDKSRWQQGNVFSCSVMHEALHNHY |
| | | | TQKSLSLSPGGPPSGSSPGDSGG (1^{st} polypeptide chain - SEQ ID NO: 132) |
| Cleavage product | 133 | AK438 | DKTHTCPPCPAPELLGGPSVFLFPPKPKDTLMISRTPEVTCVVVDVSHEDPEVKFNWYVDG |
| CP | 134 | | VEVHNAKTKPREEQYASTYRVVSVLTVLHQDWLNGKEYKCKVSNKALPAPIEKTISKAKG |
| | | | QPREPQVYTLPPCRDELTKNQVSLWCLVKGFYPSDIAVEWESNGQPENNYKTTPPVLDSDG |
| | | | SFFLYSKLTVDKSRWQQGNVFSCSVMHEALHNHYTQKSLSLSPGGGSSPPGGGSSGGGSGPAPT |
| | | | SSSTKKTQLQLEHLLLDLQMILNGINNYKNPKLTAMLTAKFAMPKKATELKHLQCLEEALKPLEE |
| | | | VLNLAQSKNFHLRPRDLISNINVIVLELKGSETTFMCEYADETATIVEFLNRWITFAQSIISTLT; |
| | | | (2^{nd} polypeptide chain - SEQ ID NO: 133) |
| | | | DKTHTCPPCPAPELLGGPSVFLFPPKPKDTLMISRTPEVTCVVVDVSHEDPEVKFNWYVDGVEVHN |
| | | | AKTKPREEQYASTYRVVSVLTVLHQDWLNGKEYKCKVSNKALPAPIEKTISKAKGQPREPQVCT |
| | | | LPPSRDELTKNQVSLSCAVKGFYPSDIAVEWESNGQPENNYKTTPPVLDSDGSFFLVSKLTVD |
| | | | KSRWQQGNVFSCSVMHEALHNHYTQKSLSLSPGGPPSGSSPGVPLS (1^{st} polypeptide |
| | | | chain - SEQ ID NO: 134) |
| Cleavage product | 135 | AK530 | DKTHTCPPCPAPELLGGPSVFLFPPKPKDTLMISRTPEVTCVVVDVSHEDPE |
| CP | 136 | | VKFNWYVDGVEVHNAKTKPREEQYASTYRVVSVLTVLHQDWLNGKEYK |
| | | | CKVSNKALPAPIEKTISKAKGQPREPQVYTLPPCRDELTKNQVSLWCLVKG |
| | | | FYPSDIAVEWESNGQPENNYKTTPPVLDSDGSFFLYSKLTVDKSRWQQGN |
| | | | VFSCSVMHEALHNHYTQKSLSLSPGGGSSPPGGGSSGGGSGPAPTSSSTKK |
| | | | TQLQLEHLLLDLQMILNGINNYKNPKLTAMLTAKFAMPKKATELKHLQC |
| | | | LEEALKPLEEVLNLAQSKNFHLRPRDLISNINVIVLELKGSETTFMCEYADET |
| | | | ATIVEFLNRWITFAQSIISTLT; (2^{nd} polypeptide chain - SEQ ID NO: 135) |
| | | | DKTHTCPPCPAPELLGGPSVFLFPPKPKDTL |
| | | | MISRTPEVTCVVVDVSHEDPEVKFNWYVDGVEVHNAKTKPREEQYASTYR |
| | | | VVSVLTVLHQDWLNGKEYKCKVSNKALPAPIEKTISKAKGQPREPQVCTLP |
| | | | PSRDELTKNQVSLSCAVKGFYPSDIAVEWESNGQPENNYKTTPPVLDSDGS |
| | | | FFLVSKLTVDKSRWQQGNVFSCSVMHEALHNHYTQKSLSLSPGGPPSGSSPMPYD |
| | | | (1^{st} polypeptide chain - SEQ ID NO: 136) |
| Cleavage product | 137 | AK539 | VVAASSGPAPTSSSTKKTQLQLEHLLLDLQMILNGINNYKNPKLTAMLTAKF |
| CP | | AK540 | AMPKKATELKHLQCLEEALKPLEEVLNLAQSKNFHLRPRDLISNINVIVLELK |
| | | AK541 | GSETTFMCEYADETATIVEFLNRWITFAQSIISTLT |
| Cleavage product | 138 | AK523 | DKTHTCPPCPAPELLGGPSVFLFPPKPKDTLMISRTPEVTCVVVDVSHEDPEVKFNW |
| CP | 139 | | YVDGVEVHNAKTKPREEQYASTYRVVSVLTVLHQDWLNGKEYKCKVSNKALPAP |
| | | | IEKTISKAKGQPREPQVYTLPPCRDELTKNQVSLWCLVKGFYPSDIAVEWESNGQPE |
| | | | NNYKTTPPVLDSDGSFFLYSKLTVDKSRWQQGNVFSCSVMHEALHNHYTQKSLSLS |
| | | | PGGGSSPPGGGSSGGGSGPAPTSSSTKKTQLQLEHLLLDLQMILNGINNYKNPKLTAM |
| | | | LTAKFAMPKKATELKHLQCLEEALKPLEEVLNLAQSKNFHLRPRDLISNINVIVLELKG |
| | | | SETTFMCEYADETATIVEFLNRWITFAQSIISTLT (2^{nd} polypeptide chain - |
| | | | SEQ ID NO: 138) |
| | | | DKTHTCPPCPAPELLGGPSVFLFPPKPKDTLMISRTPEVTCVVVDVSHEDPEVKFNWY |
| | | | VDGVEVHNAKTKPREEQYASTYRVVSVLTVLHQDWLNGKEYKCKVSNKALPAPIEK |
| | | | TISKAKGQPREPQVCTLPPSRDELTKNQVSLSCAVKGFYPSDIAVEWESNGQPENNY |
| | | | KTTPPVLDSDGSFFLVSKLTVDKSRWQQGNVFSCSVMHEALHNHYTQKSLSLSPGGSPDLLA (1^{st} |
| | | | polypeptide chain- - SEQ ID NO: 139) |
| Cleavage product | 140 | AK524 | DKTHTCPPCPAPELLGGPSVFLFPPKPKDTLMISRTPEVTCVVVDVSHEDPEVKFNW |
| CP | 141 | | YVDGVEVHNAKTKPREEQYASTYRVVSVLTVLHQDWLNGKEYKCKVSNKALPAP |
| | | | IEKTISKAKGQPREPQVYTLPPCRDELTKNQVSLWCLVKGFYPSDIAVEWESNGQPE |
| | | | NNYKTTPPVLDSDGSFFLYSKLTVDKSRWQQGNVFSCSVMHEALHNHYTQKSLSLS |
| | | | PGGGSSPPGGGSSGGGSGPAPTSSSTKKTQLQLEHLLLDLQMILNGINNYKNPKLTAM |
| | | | LTAKFAMPKKATELKHLQCLEEALKPLEEVLNLAQSKNFHLRPRDLISNINVIVLELKG |
| | | | SETTFMCEYADETATIVEFLNRWITFAQSIISTLT (2^{nd} polypeptide chain - |
| | | | SEQ ID NO: 140) |
| | | | DKTHTCPPCPAPELLGGPSVFLFPPKPKDTLMISRTPEVTCVVVDVSHEDPEVKFNWY |
| | | | VDGVEVHNAKTKPREEQYASTYRVVSVLTVLHQDWLNGKEYKCKVSNKALPAPIEK |
| | | | TISKAKGQPREPQVCTLPPSRDELTKNQVSLSCAVKGFYPSDIAVEWESNGQPENNY |
| | | | kttppvldsdgsfflvskltvdksrwqqgnvfscsvmhealhnhytqkslslspgg |
| | | | SPGDLLA (1^{st} polypeptide chain - SEQ ID NO: 141) |
| Cleavage product | 142 | AK525 | DKTHTCPPCPAPELLGGPSVFLFPPKPKDTLMISRTPEVTCVVVDVSHEDPEVKFNW |
| CP | 143 | | YVDGVEVHNAKTKPREEQYASTYRVVSVLTVLHQDWLNGKEYKCKVSNKALPAP |
| | | | IEKTISKAKGQPREPQVYTLPPCRDELTKNQVSLWCLVKGFYPSDIAVEWESNGQPE |
| | | | NNYKTTPPVLDSDGSFFLYSKLTVDKSRWQQGNVFSCSVMHEALHNHYTQKSLSLS |
| | | | PGGGSSPPGGGSSGGGSGPAPTSSSTKKTQLQLEHLLLDLQMILNGINNYKNPKLTAM |
| | | | LTAKFAMPKKATELKHLQCLEEALKPLEEVLNLAQSKNFHLRPRDLISNINVIVLELKG |
| | | | SETTFMCEYADETATIVEFLNRWITFAQSIISTLT (2^{nd} polypeptide chain - |
| | | | SEQ ID NO: 142) |
| | | | DKTHTCPPCPAPELLGGPSVFLFPPKPKDTLMISRTPEVTCVVVDVSHEDPEVKFNWY |
| | | | VDGVEVHNAKTKPREEQYASTYRVVSVLTVLHQDWLNGKEYKCKVSNKALPAPIEK |
| | | | TISKAKGQPREPQVCTLPPSRDELTKNQVSLSCAVKGFYPSDIAVEWESNGQPENNY |
| | | | KTTPPVLDSDGSFFLVSKLTVDKSRWQQGNVFSCSVMHEALHNHYTQKSLSLSPGGSG |
| | | | SPSDLLA (1^{st} polypeptide chain - SEQ ID NO: 143) |

| | SEQ ID | |
|---|---|---|
| DESCRIPTION | NO: | SEQUENCE |
| MM1 | 60 | ELCDDDPPEIPHATFKAMAYKEGTMLNCECKRGFRRIKSGSLYMLCTGNSSHSSWDNQC |
| | | QCTSSATRNTTKQVTPQPEEQKERKTTEMQSPMQPVDQASLPGHCREPPPWENEATERIY |
| | | HFVVGQMVYYQCVQGYRALHRGPAESVCKMTHGKTRWTQPQLICT |
| Linker L1 | 61 | PA |
| IL-2 domain | 62 | APTSSSTKKTQLQLEHLLLDLQMILNGINNYKNPKLTRMLTFKFYMPKKATELKHLQCLE |
| | | EELKPLEEVLNLAQSKNFHLRPRDLISNINVIVLELKGSETTFMCEYADETATIVEFLNRWI |
| | | TFAQSIISTLT |
| Linker L2 | 63 | GGGGGGGGGGGGGGGGGGGGGGGGGGGGGGGGGGG |
| MM2 | 64 | AVNGTSQFTCFYNSRANISCVWSQDGALQDTSCQVHAWPDRRRWNQTCELLPVSQASW |
| | | ACNLILGAPDSQKLTTVDIVTLRVLCREGVRWRVMAIQDFKPFENLRLMAPISLQVVHVE |
| | | THRCNISWEISQASHYFERHLEFEARTLSPGHTWEEAPLLTLKQKQEWICLETLTPDTQYE |
| | | FQVRVKPLQ |
| HL | 65 | DKTHTCPPCPAPELLGGPSVFLFPPKPKDTLMISRTPEVTCVVVDVSHEDPEVKFNWYVD |
| | | GVEVHNAKTKPREEQYASTYRVVSVLTVLHQDWLNGKEYKCKVSNKALPAPIEKTISKA |
| | | KGQPREPQVYTLPPSRDELTKNQVSLTCLVKGFYPSDIAVEWESNGQPENNYKTTPPVLD |
| | | SDGSFFLYSKLTVDKSRWQQGNVFSCSVMHEALHNHYTQKSLSLSPG |
| Polypeptide chain | 66 | DKTHTCPPCPAPELLGGPSVFLFPPKPKDTLMISRTPEVTCVVVDVSHEDPEVKFNWYVD |
| | | GVEVHNAKTKPREEQYASTYRVVSVLTVLHQDWLNGKEYKCKVSNKALPAPIEKTISKA |
| | | KGQPREPQVYTLPPSRDELTKNQVSLTCLVKGFYPSDIAVEWESNGQPENNYKTTPPVLD |
| | | SDGSFFLYSKLTVDKSRWQQGNVFSCSVMHEALHNHYTQKSLSLSPGPAELCDDDPPEIP |
| | | HATFKAMAYKEGTMLNCECKRGFRRIKSGSLYMLCTGNSSHSSWDNQCQCTSSATRNTT |
| | | KQVTPQPEEQKERKTTEMQSPMQPVDQASLPGHCREPPPWENEATERIYHFVVGQMVYY |
| | | QCVQGYRALHRGPAESVCKMTHGKTRWTQPQLICTGGGGGGGGGGGGGGGGGGGGG |
| | | GGGGGGGGGGGGGGAPTSSSTKKTQLQLEHLLLDLQMILNGINNYKNPKLTRMLTFKFY |
| | | MPKKATELKHLQCLEEELKPLEEVLNLAQSKNFHLRPRDLISNINVIVLELKGSETTFMCE |
| | | YADETATIVEFLNRWITFAQSIISTLTGPPSGSSPMPYDLYHPSGGGAVNGTSQFTCFYNSR |
| | | ANISCVWSQDGALQDTSCQVHAWPDRRRWNQTCELLPVSQASWACNLILGAPDSQKLT |
| | | TVDIVTLRVLCREGVRWRVMAIQDFKPFENLRLMAPISLQWHVETHRCNISWEISQASH |
| | | YFERHLEFEARTLSPGHTWEEAPLLTLKQKQEWICLETLTPDTQYEFQVRVKPLQ |
| Polypeptide chain | 67 | DKTHTCPPCPAPELLGGPSVFLFPPKPKDTLMISRTPEVTCVVVDVSHEDPEVKFNWYVD |
| | | GVEVHNAKTKPREEQYASTYRVVSVLTVLHQDWLNGKEYKCKVSNKALPAPIEKTISKA |
| | | KGQPREPQVYTLPPSRDELTKNQVSLTCLVKGFYPSDIAVEWESNGQPENNYKTTPPVLD |
| | | SDGSFFLYSKLTVDKSRWQQGNVFSCSVMHEALHNHYTQKSLSLSPGAPTSSSTKKTQLQ |
| | | LEHLLLDLQMILNGINNYKNPKLTRMLTFKFYMPKKATELKHLQCLEEELKPLEEVLNLA |
| | | QSKNFHLRPRDLISNINVIVLELKGSETTFMCEYADETATIVEFLNRWITFAQSIISTLT |
| Polypeptide chain | 68 | DKTHTCPPCPAPELLGGPSVFLFPPKPKDTLMISRTPEVTCVVVDVSHEDPEVKFNWYVD |
| | | GVEVHNAKTKPREEQYASTYRVVSVLTVLHQDWLNGKEYKCKVSNKALPAPIEKTISKA |
| | | KGQPREPQVYTLPPSRDELTKNQVSLTCLVKGFYPSDIAVEWESNGQPENNYKTTPPVLD |
| | | SDGSFFLYSKLTVDKSRWQQGNVFSCSVMHEALHNHYTQKSLSLSPGAPTSSSTKKTQLQ |
| | | LEHLLLDLQMILNGINNYKNPKLTAMLTAKFAMPKKATELKHLQCLEEALKPLEEVLNL |
| | | AQSKNFHLRPRDLISNINVIVLELKGSETTFMCEYADETATIVEFLNRWITFAQSIISTLT |
| IL-2 domain | 69 | APTSSSTKKTQLQLEHLLLDLQMILNGINNYKNPKLTRMLTFKFYMPKKATELKHLQCLE |
| | | ERLKPLEEVLNLAQSKNFHLRPRDLISNINVIVLELKGSETTFMCEYADETATIVEFLNRWI |
| | | TFAQSIISTLT |
| IL-2 domain | 70 | APTSSSTKKTQLQLEHLLLDLQMILNGINNYKNPKLTRMLTEKFYMPKKATELKHLQCLE |
| | | EELKPLEEVLNLAQSKNFHLRPRDLISNINVIVLELKGSETTFMCEYADETATIVEFLNRWI |
| | | TFAQSIISTLT |
| IL-2 domain | 71 | APTSSSTKKTQLQLEHLLLDLQMILNGINNYKNPKLTRMLTFKFYMPKKATELKHLQCLE |
| | | FSLKPLFFVLNLAQSKNFHLRPRDLISNINVIVLFLKGSETTFMCFYADFTATIVFFLNRWI |
| | | TFAQSIISTLT |
| IL-2 domain | 72 | APTSSSTKKTQLQLEHLLLDLQMILNGINNYKNPKLTRMLTAKFYMPKKATELKHLQCLE |
| | | EELKPLEEVLNLAQSKNFHLRPRDLISNINVIVLELKGSETTFMCEYADETATIVEFLNRWI |
| | | TFAQSIISTLT |
| IL-2 domain | 73 | APTSSSTKKTQLQLEHLLLDLQMILNGINNYKNPKLTRMLTFKFRMPKKATELKHLQCLE |
| | | EELKPLEEVLNLAQSKNFHLRPRDLISNINVIVLELKGSETTFMCEYADETATIVEFLNRWI |
| | | TFAQSIISTLT |
| IL-2 domain | 74 | APTSSSTKKTQLQLEHLLLDLQMILNGINNYKNPKLTRMLTSKFYMPKKATELKHLQCLE |
| | | ESLKPLEEVLNLAQSKNFHLRPRDLISNINVIVLELKGSETTFMCEYADETATIVEFLNRWI |
| | | TFAQSIISTLT |
| Linker L1 | 75 | PGSG |
| Linker L1 | 76 | GGSSPPRAAAVKSPSGP |
| Linker L1 | 77 | GGPGGPRAAAVKSPSGP |
| Linker L1 | 78 | GSPGVPLSLYSGP |
| HL | 79 | DKTHTCPPCPAPELLGGPSVFLFPPKPKDTLMISRTPEVTCVVVDVSHEDPEVKFNWYVD |
| | | GVEVHNAKTKPREEQYASTYRVVSVLTVLHQDWLNGKEYKCKVSNKALPAPIEKTISKA |
| | | KGQPREPQVCTLPPSRDELTKNQVSLSCAVKGFYPSDIAVEWESNGQPENNYKTTPPVLD |
| | | SDGSFFLVSKLTVDKSRWQQGNVFSCSVMHEALHNHYTQKSLSLSPGK |
| HL | 80 | DKTHTCPPCPAPELLGGPSVFLFPPKPKDTLMISRTPEVTCVVVDVSHEDPEVKFNWYVD |
| | | GVEVHNAKTKPREEQYASTYRVVSVLTVLHQDWLNGKEYKCKVSNKALPAPIEKTISKA |
| | | KGQPREPQVYTLPPCRKELTKNQVSLWCLVKGFYPSDIAVEWESNGQPENNYKTTPPVL |
| | | KSDGSFFLYSKLTVDKSRWQQGNVFSCSVMHEALHNHYTQKSLSLSPG |
| HL | 81 | DKTHTCPPCPAPELLGGPSVFLFPPKPKDTLMISRTPEVTCVVVDVSHEDPEVKFNWYVD |
| | | GVEVHNAKTKPREEQYASTYRVVSVLTVLHQDWLNGKEYKCKVSNKALPAPIEKTISKA |
| | | KGQPREPQVCTLPPSRDELTKNQVSLSCAVKGFYPSDIAVEWESNGQPENNYDTTPPVLD |
| | | SDGSFFLVSDLTVDKSRWQQGNVFSCSVMHEALHNHYTQKSLSLSPG |
| HL | 82 | DKTHTCPPCPAPELLGGPSVFLFPPKPKDTLMISRTPEVTCVVVDVSHEDPEVKFNWYVD |
| | | GVEVHNAKTKPREEQYASTYRVVSVLTVLHQDWLNGKEYKCKVSNKALPAPIEKTISKA |
| | | KGQPREPQVYTLPPCRKKLTKNQVSLWCLVKGFYPSDIAVEWESNGQPENNYKTTPPVL |
| | | DSDGSFFLYSKLTVDKSRWQQGNVFSCSVMHEALHNHYTQKSLSLSPG |
| HL | 83 | DKTHTCPPCPAPELLGGPSVFLFPPKPKDTLMISRTPEVTCVVVDVSHEDPEVKFNWYVD |
| | | GVEVHNAKTKPREEQYASTYRVVSVLTVLHQDWLNGKEYKCKVSNKALPAPIEKTISKA |
| | | KGQPREPQVCTLPPSRDELTKNQVSLSCAVEGFYPSDIAVEWESNGQPENNYKTTPPVLD |
| | | SDGSFFLVSKLTVDKSRWQQGNVFSCSVMHEALHNHYTQESLSLSPG |
| HL | 84 | DKTHTCPPCPAPELLGGPSVFLFPPKPKDTLMISRTPEVTCVVVDVSHEDPEVKFNWYVD |
| | | GVEVHNAKTKPREEQYASTYRVVSVLTVLHQDWLNGKEYKCKVSNKALPAPIEKTISKA |
| | | KGQPREPQVYTLPPCRKKLTKNQVSLWCLVKGFYPSDIAVEWESNGQPENNYKTTPPVL |
| | | DSDGSFFLYSKLTVDKSRWQQGNVFSCSVMHEALHNHYTQKSLSLSPGK |
| Polypeptide chain | 85 | DKTHTCPPCPAPELLGGPSVFLFPPKPKDTLMISRTPEVTCVVVDVSHEDPEVKFNWYVD |
| | | GVEVHNAKTKPREEQYASTYRVVSVLTVLHQDWLNGKEYKCKVSNKALPAPIEKTISKA |
| | | KGQPREPQVYTLPPCRDELTKNQVSLWCLVKGFYPSDIAVEWESNGQPENNYKTTPPVL |
| | | DSDGSFFLYSKLTVDKSRWQQGNVFSCSVMHEALHNHYTQKSLSLSPGGGSSPPMPYDL |
| | | YHPSGPAPTSSSTKKTQLQLEHLLLDLQMILNGINNYKNPKLTRMLTFKFYMPKKATELK |
| | | HLQCLEEELKPLEEVLNLAQSKNFHLRPRDLISNINVIVLELKGSETTFMCEYADETATIVE |
| | | FLNRWITFAQSIISTLT |
| Polypeptide chain | 86 | DKTHTCPPCPAPELLGGPSVFLFPPKPKDTLMISRTPEVTCVVVDVSHEDPEVKFNWYVD |
| | | GVEVHNAKTKPREEQYASTYRVVSVLTVLHQDWLNGKEYKCKVSNKALPAPIEKTISKA |
| | | KGQPREPQVYTLPPCRKELTKNQVSLWCLVKGFYPSDIAVEWESNGQPENNYKTTPPVL |
| | | KSDGSFFLYSKLTVDKSRWQQGNVFSCSVMHEALHNHYTQKSLSLSPGGPPSGSSPMPY |
| | | DLYHPSGGGAVNGTSQFTCFYNSRANISCVWSQDGALQDTSCQVHAWPDRRRWNQTCE |
| | | LLPVSQASWACNLILGAPDSQKLTTVDIVTLRVLCREGVRWRVMAIQDFKPFENLRLMAP |
| | | ISLQVVHVETHRCNISWEISQASHYFERHLEFEARTLSPGHTWEEAPLLTLKQKQEWICLE |
| | | TLTPDTQYEFQVRVKPLQGEFTTWSPWSQPLAFRTKPAALGKD |
| Polypeptide chain | 87 | DKTHTCPPCPAPELLGGPSVFLFPPKPKDTLMISRTPEVTCVVVDVSHEDPEVKFNWYVD |
| | | GVEVHNAKTKPREEQYASTYRVVSVLTVLHQDWLNGKEYKCKVSNKALPAPIEKTISKA |
| | | KGQPREPQVCTLPPSRDELTKNQVSLSCAVKGFYPSDIAVEWESNGQPENNYDTTPPVLD |
| | | SDGSFFLVSDLTVDKSRWQQGNVFSCSVMHEALHNHYTQKSLSLSPGAPTSSSTKKTQLQ |
| | | LEHLLLDLQMILNGINNYKNPKLTRMLTFKFYMPKKATELKHLQCLEEELKPLEEVLNLA |
| | | QSKNFHLRPRDLISNINVIVLELKGSETTFMCEYADETATIVEFLNRWITFAQSIISTLT |
| Polypeptide chain | 88 | DKTHTCPPCPAPELLGGPSVFLFPPKPKDTLMISRTPEVTCVVVDVSHEDPEVKFNWYVD |
| | | GVEVHNAKTKPREEQYASTYRVVSVLTVLHQDWLNGKEYKCKVSNKALPAPIEKTISKA |
| | | KGQPREPQVYTLPPCRKKLTKNQVSLWCLVKGFYPSDIAVEWESNGQPENNYKTTPPVL |
| | | DSDGSFFLYSKLTVDKSRWQQGNVFSCSVMHEALHNHYTQKSLSLSPGGPPSGSSPMPY |
| | | DLYHPSGGGAVNGTSQFTCFYNSRANISCVWSQDGALQDTSCQVHAWPDRRRWNQTCE |
| | | LLPVSQASWACNLILGAPDSQKLTTVDIVTLRVLCREGVRWRVMAIQDFKPFENLRLMAP |
| | | ISLQVVHVETHRCNISWEISQASHYFERHLEFEARTLSPGHTWEEAPLLTLKQKQEWICLE |
| | | TLTPDTQYEFQVRVKPLQGEFTTWSPWSQPLAFRTKPAALGKD |
| Polypeptide chain | 89 | DKTHTCPPCPAPELLGGPSVFLFPPKPKDTLMISRTPEVTCVVVDVSHEDPEVKFNWYVD |
| | | GVEVHNAKTKPREEQYASTYRVVSVLTVLHQDWLNGKEYKCKVSNKALPAPIEKTISKA |
| | | KGQPREPQVCTLPPSRDELTKNQVSLSCAVEGFYPSDIAVEWESNGQPENNYKTTPPVLD |
| | | SDGSFFLVSKLTVDKSRWQQGNVFSCSVMHEALHNHYTQESLSLSPGAPTSSSTKKTQLQ |
| | | LEHLLLDLQMILNGINNYKNPKLTRMLTFKFYMPKKATELKHLQCLEEELKPLEEVLNLA |
| | | QSKNFHLRPRDLISNINVIVLELKGSETTFMCEYADETATIVEFLNRWITFAQSIISTLT |
| Polypeptide chain | 90 | DKTHTCPPCPAPELLGGPSVFLFPPKPKDTLMISRTPEVTCVVVDVSHEDPEVKFNWYVD |
| | | GVEVHNAKTKPREEQYASTYRVVSVLTVLHQDWLNGKEYKCKVSNKALPAPIEKTISKA |
| | | KGQPREPQVCTLPPSRDELTKNQVSLSCAVEGFYPSDIAVEWESNGQPENNYKTTPPVLD |
| | | SDGSFFLVSKLTVDKSRWQQGNVFSCSVMHEALHNHYTQESLSLSPGGGSSPPMPYDLY |
| | | HPSGPAPTSSSTKKTQLQLEHLLLDLQMILNGINNYKNPKLTRMLTFKFYMPKKATELKH |
| | | LQCLEEELKPLEEVLNLAQSKNFHLRPRDLISNINVIVLELKGSETTFMCEYADETATIVEF |
| | | LNRWITFAQSIISTLT |
| Polypeptide chain | 91 | DKTHTCPPCPAPELLGGPSVFLFPPKPKDTLMISRTPEVTCVVVDVSHEDPEVKFNWYVD |
| | | GVEVHNAKTKPREEQYASTYRVVSVLTVLHQDWLNGKEYKCKVSNKALPAPIEKTISKA |
| | | KGQPREPQVYTLPPCRKKLTKNQVSLWCLVKGFYPSDIAVEWESNGQPENNYKTTPPVL |
| | | DSDGSFFLYSKLTVDKSRWQQGNVFSCSVMHEALHNHYTQKSLSLSPGK |
| Polypeptide chain | 92 | DKTHTCPPCPAPELLGGPSVFLFPPKPKDTLMISRTPEVTCVVVDVSHEDPEVKFNWYVD |
| | | GVEVHNAKTKPREEQYASTYRVVSVLTVLHQDWLNGKEYKCKVSNKALPAPIEKTISKA |
| | | KGQPREPQVYTLPPCRKKLTKNQVSLWCLVKGFYPSDIAVEWESNGQPENNYKTTPPVL |
| | | DSDGSFFLYSKLTVDKSRWQQGNVFSCSVMHEALHNHYTQKSLSLSPGPGSGAVNGTSQ |
| | | FTCFYNSRANISCVWSQDGALQDTSCQVHAWPDRRRWNQTCELLPVSQASWACNLILG |
| | | APDSQKLTTVDIVTLRVLCREGVRWRVMAIQDFKPFENLRLMAPISLQWHVETHRCNIS |
| | | WEISQASHYFERHLEFEARTLSPGHTWEEAPLLTLKQKQEWICLETLTPDTQYEFQVRVK |
| | | PLQGEFTTWSPWSQPLAFRTKPAALGKD |
| Polypeptide chain | 93 | DKTHTCPPCPAPELLGGPSVFLFPPKPKDTLMISRTPEVTCVVVDVSHEDPEVKFNWYVD |
| | | GVEVHNAKTKPREEQYASTYRVVSVLTVLHQDWLNGKEYKCKVSNKALPAPIEKTISKA |
| | | KGQPREPQVYTLPPCRDELTKNQVSLWCLVKGFYPSDIAVEWESNGQPENNYKTTPPVL |
| | | DSDGSFFLYSKLTVDKSRWQQGNVFSCSVMHEALHNHYTQKSLSLSPGGGSSPPMPYDL |
| | | YHPSGPAPTSSSTKKTQLQLEHLLLDLQMILNGINNYKNPKLTAMLTAKFAMPKKATELK |
| | | HLQCLEEALKPLEEVLNLAQSKNFHLRPRDLISNINVIVLELKGSETTFMCEYADETATIVE |
| | | FLNRWITFAQSIISTLT |
| Polypeptide chain | 94 | DKTHTCPPCPAPELLGGPSVFLFPPKPKDTLMISRTPEVTCVVVDVSHEDPEVKFNWYVD |
| | | GVEVHNAKTKPREEQYASTYRVVSVLTVLHQDWLNGKEYKCKVSNKALPAPIEKTISKA |
| | | KGQPREPQVYTLPPCRDELTKNQVSLWCLVKGFYPSDIAVEWESNGQPENNYKTTPPVL |
| | | DSDGSFFLYSKLTVDKSRWQQGNVFSCSVMHEALHNHYTQKSLSLSPGGGPGGPRAAAV |
| | | KSPSGPAPTSSSTKKTQLQLEHLLLDLQMILNGINNYKNPKLTRMLTFKFYMPKKATELK |
| | | HLQCLEEELKPLEEVLNLAQSKNFHLRPRDLISNINVIVLELKGSETTFMCEYADETATIVE |
| | | FLNRWITFAQSIISTLT |
| Polypeptide chain | 95 | DKTHTCPPCPAPELLGGPSVFLFPPKPKDTLMISRTPEVTCVVVDVSHEDPEVKFNWYVD |
| | | GVEVHNAKTKPREEQYASTYRVVSVLTVLHQDWLNGKEYKCKVSNKALPAPIEKTISKA |
| | | KGQPREPQVYTLPPCRDELTKNQVSLWCLVKGFYPSDIAVEWESNGQPENNYKTTPPVL |
| | | DSDGSFFLYSKLTVDKSRWQQGNVFSCSVMHEALHNHYTQKSLSLSPGGGSSPPRAAAV |
| | | KSPSGPAPTSSSTKKTQLQLEHLLLDLQMILNGINNYKNPKLTAMLTAKFAMPKKATELK |
| | | HLQCLEEALKPLEEVLNLAQSKNFHLRPRDLISNINVIVLELKGSETTFMCEYADETATIVE |
| | | FLNRWITFAQSIISTLT |
| Polypeptide chain | 96 | DKTHTCPPCPAPELLGGPSVFLFPPKPKDTLMISRTPEVTCVVVDVSHEDPEVKFNWYVD |
| | | GVEVHNAKTKPREEQYASTYRVVSVLTVLHQDWLNGKEYKCKVSNKALPAPIEKTISKA |
| | | KGQPREPQVYTLPPCRDELTKNQVSLWCLVKGFYPSDIAVEWESNGQPENNYKTTPPVL |
| | | DSDGSFFLYSKLTVDKSRWQQGNVFSCSVMHEALHNHYTQKSLSLSPGGGPGGPRAAAV |
| | | KSPSGPAPTSSSTKKTQLQLEHLLLDLQMILNGINNYKNPKLTAMLTAKFAMPKKATELK |
| | | HLQCLEEALKPLEEVLNLAQSKNFHLRPRDLISNINVIVLELKGSETTFMCEYADETATIVE |
| | | FLNRWITFAQSIISTLT |
| Polypeptide chain | 97 | DKTHTCPPCPAPELLGGPSVFLFPPKPKDTLMISRTPEVTCVVVDVSHEDPEVKFNWYVD |
| | | GVEVHNAKTKPREEQYASTYRVVSVLTVLHQDWLNGKEYKCKVSNKALPAPIEKTISKA |
| | | KGQPREPQVYTLPPCRDELTKNQVSLWCLVKGFYPSDIAVEWESNGQPENNYKTTPPVL |
| | | DSDGSFFLYSKLTVDKSRWQQGNVFSCSVMHEALHNHYTQKSLSLSPGGGSGRAAAVKS |
| | | PSGPAPTSSSTKKTQLQLEHLLLDLQMILNGINNYKNPKLTRMLTFKFYMPKKATELKHL |
| | | QCLEEELKPLEEVLNLAQSKNFHLRPRDLISNINVIVLELKGSETTFMCEYADETATIVEFL |
| | | NRWITFAQSIISTLT |
| Polypeptide chain | 98 | DKTHTCPPCPAPELLGGPSVFLFPPKPKDTLMISRTPEVTCVVVDVSHEDPEVKFNWYVD |
| | | GVEVHNAKTKPREEQYASTYRVVSVLTVLHQDWLNGKEYKCKVSNKALPAPIEKTISKA |
| | | KGQPREPQVYTLPPCRDELTKNQVSLWCLVKGFYPSDIAVEWESNGQPENNYKTTPPVL |
| | | DSDGSFFLYSKLTVDKSRWQQGNVFSCSVMHEALHNHYTQKSLSLSPGGGSSPPGGGSS |
| | | GGGSGPAPTSSSTKKTQLQLEHLLLDLQMILNGINNYKNPKLTAMLTAKFAMPKKATEL |
| | | KHLQCLEEALKPLEEVLNLAQSKNFHLRPRDLISNINVIVLELKGSETTFMCEYADETATI |
| | | VEFLNRWITFAQSIISTLT |
| Polypeptide chain | 99 | DKTHTCPPCPAPELLGGPSVFLFPPKPKDTLMISRTPEVTCVVVDVSHEDPEVKFNWYVD |
| | | GVEVHNAKTKPREEQYASTYRVVSVLTVLHQDWLNGKEYKCKVSNKALPAPIEKTISKA |
| | | KGQPREPQVYTLPPCRDELTKNQVSLWCLVKGFYPSDIAVEWESNGQPENNYKTTPPVL |
| | | DSDGSFFLYSKLTVDKSRWQQGNVFSCSVMHEALHNHYTQKSLSLSPGGGSSPPMPYDL |
| | | YHPSGPAPTSSSTKKTQLQLEHLLLDLQMILNGINNYKNPKLTRMLTFKFYMPKKATELK |
| | | HLQCLEERLKPLEEVLNLAQSKNFHLRPRDLISNINVIVLELKGSETTFMCEYADETATIVE |
| | | FLNRWITFAQSIISTLT |
| Polypeptide chain | 100 | DKTHTCPPCPAPELLGGPSVFLFPPKPKDTLMISRTPEVTCVVVDVSHEDPEVKFNWYVD |
| | | GVEVHNAKTKPREEQYASTYRVVSVLTVLHQDWLNGKEYKCKVSNKALPAPIEKTISKA |
| | | KGQPREPQVYTLPPCRDELTKNQVSLWCLVKGFYPSDIAVEWESNGQPENNYKTTPPVL |
| | | DSDGSFFLYSKLTVDKSRWQQGNVFSCSVMHEALHNHYTQKSLSLSPGGGSSPPMPYDL |
| | | YHPSGPAPTSSSTKKTQLQLEHLLLDLQMILNGINNYKNPKLTRMLTEKFYMPKKATELK |
| | | HLQCLEEELKPLEEVLNLAQSKNFHLRPRDLISNINVIVLELKGSETTFMCEYADETATIVE |
| | | FLNRWITFAQSIISTLT |
| Polypeptide chain | 101 | DKTHTCPPCPAPELLGGPSVFLFPPKPKDTLMISRTPEVTCVVVDVSHEDPEVKFNWYVD |
| | | GVEVHNAKTKPREEQYASTYRVVSVLTVLHQDWLNGKEYKCKVSNKALPAPIEKTISKA |
| | | KGQPREPQVYTLPPCRDELTKNQVSLWCLVKGFYPSDIAVEWESNGQPENNYKTTPPVL |
| | | DSDGSFFLYSKLTVDKSRWQQGNVFSCSVMHEALHNHYTQKSLSLSPGGGSSPPMPYDL |
| | | YHPSGPAPTSSSTKKTQLQLEHLLLDLQMILNGINNYKNPKLTRMLTFKFYMPKKATELK |
| | | HLQCLEESLKPLEEVLNLAQSKNFHLRPRDLISNINVIVLELKGSETTFMCEYADETATIVE |
| | | FLNRWITFAQSIISTLT |
| Polypeptide chain | 102 | DKTHTCPPCPAPELLGGPSVFLFPPKPKDTLMISRTPEVTCVVVDVSHEDPEVKFNWYVD |
| | | GVEVHNAKTKPREEQYASTYRVVSVLTVLHQDWLNGKEYKCKVSNKALPAPIEKTISKA |
| | | KGQPREPQVYTLPPCRDELTKNQVSLWCLVKGFYPSDIAVEWESNGQPENNYKTTPPVL |
| | | DSDGSFFLYSKLTVDKSRWQQGNVFSCSVMHEALHNHYTQKSLSLSPGGGSSPPMPYDL |
| | | YHPSGPAPTSSSTKKTQLQLEHLLLDLQMILNGINNYKNPKLTRMLTAKFYMPKKATELK |
| | | HLQCLEEELKPLEEVLNLAQSKNFHLRPRDLISNINVIVLELKGSETTFMCEYADETATIVE |
| | | FLNRWITFAQSIISTLT |
| Polypeptide chain | 103 | DKTHTCPPCPAPELLGGPSVFLFPPKPKDTLMISRTPEVTCVVVDVSHEDPEVKFNWYVD |
| | | GVEVHNAKTKPREEQYASTYRVVSVLTVLHQDWLNGKEYKCKVSNKALPAPIEKTISKA |
| | | KGQPREPQVYTLPPCRDELTKNQVSLWCLVKGFYPSDIAVEWESNGQPENNYKTTPPVL |
| | | DSDGSFFLYSKLTVDKSRWQQGNVFSCSVMHEALHNHYTQKSLSLSPGGGSSPPMPYDL |
| | | YHPSGPAPTSSSTKKTQLQLEHLLLDLQMILNGINNYKNPKLTRMLTFKFRMPKKATELK |
| | | HLQCLEEELKPLEEVLNLAQSKNFHLRPRDLISNINVIVLELKGSETTFMCEYADETATIVE |
| | | FLNRWITFAQSIISTLT |
| Polypeptide chain | 104 | DKTHTCPPCPAPELLGGPSVFLFPPKPKDTLMISRTPEVTCVVVDVSHEDPEVKFNWYVD |
| | | GVEVHNAKTKPREEQYASTYRVVSVLTVLHQDWLNGKEYKCKVSNKALPAPIEKTISKA |
| | | KGQPREPQVYTLPPCRDELTKNQVSLWCLVKGFYPSDIAVEWESNGQPENNYKTTPPVL |
| | | DSDGSFFLYSKLTVDKSRWQQGNVFSCSVMHEALHNHYTQKSLSLSPGGGSSPPMPYDL |
| | | YHPSGPAPTSSSTKKTQLQLEHLLLDLQMILNGINNYKNPKLTRMLTSKFYMPKKATELK |
| | | HLQCLFFSLKPLFEVLNLAQSKNFHLRPRDLISNINVIVLELKGSFTTFMCEYADETATIVE |
| | | FLNRWITFAQSIISTLT |
| Polypeptide chain | 105 | DKTHTCPPCPAPELLGGPSVFLFPPKPKDTLMISRTPEVTCVVVDVSHEDPEVKFNWYVD |
| | | GVEVHNAKTKPREEQYASTYRVVSVLTVLHQDWLNGKEYKCKVSNKALPAPIEKTISKA |
| | | KGQPREPQVYTLPPCRDELTKNQVSLWCLVKGFYPSDIAVEWESNGQPENNYKTTPPVL |
| | | DSDGSFFLYSKLTVDKSRWQQGNVFSCSVMHEALHNHYTQKSLSLSPGGSPGVPLSLYSG |
| | | PAPTSSSTKKTQLQLEHLLLDLQMILNGINNYKNPKLTRMLTFKFYMPKKATELKHLQCL |
| | | EERLKPLEEVLNLAQSKNFHLRPRDLISNINVIVLELKGSETTFMCEYADETATIVEFLNR |
| | | WITFAQSIISTLT |
| Polypeptide chain | 106 | DKTHTCPPCPAPELLGGPSVFLFPPKPKDTLMISRTPEVTCVVVDVSHEDPEVKFNWYVD |
| | | GVEVHNAKTKPREEQYASTYRVVSVLTVLHQDWLNGKEYKCKVSNKALPAPIEKTISKA |
| | | KGQPREPQVYTLPPCRDELTKNQVSLWCLVKGFYPSDIAVEWESNGQPENNYKTTPPVL |
| | | DSDGSFFLYSKLTVDKSRWQQGNVFSCSVMHEALHNHYTQKSLSLSPGGSPGVPLSLYSG |
| | | PAPTSSSTKKTQLQLEHLLLDLQMILNGINNYKNPKLTRMLTEKFYMPKKATELKHLQCL |
| | | EEELKPLEEVLNLAQSKNFHLRPRDLISNINVIVLELKGSETTFMCEYADETATIVEFLNRW |
| | | ITFAQSIISTLT |
| Polypeptide chain | 107 | DKTHTCPPCPAPELLGGPSVFLFPPKPKDTLMISRTPEVTCVVVDVSHEDPEVKFNWYVD |
| | | GVEVHNAKTKPREEQYASTYRVVSVLTVLHQDWLNGKEYKCKVSNKALPAPIEKTISKA |
| | | KGQPREPQVYTLPPCRDELTKNQVSLWCLVKGFYPSDIAVEWESNGQPENNYKTTPPVL |
| | | DSDGSFFLYSKLTVDKSRWQQGNVFSCSVMHEALHNHYTQKSLSLSPGGSPGVPLSLYSG |
| | | PAPTSSSTKKTQLQLEHLLLDLQMILNGINNYKNPKLTRMLTFKFYMPKKATELKHLQCL |
| | | EESLKPLEEVLNLAQSKNFHLRPRDLISNINVIVLELKGSETTFMCEYADETATIVEFLNRW |
| | | ITFAQSIISTLT |
| Polypeptide chain | 108 | DKTHTCPPCPAPELLGGPSVFLFPPKPKDTLMISRTPEVTCVVVDVSHEDPEVKFNWYVD |
| | | GVEVHNAKTKPREEQYASTYRVVSVLTVLHQDWLNGKEYKCKVSNKALPAPIEKTISKA |
| | | KGQPREPQVYTLPPCRDELTKNQVSLWCLVKGFYPSDIAVEWESNGQPENNYKTTPPVL |
| | | DSDGSFFLYSKLTVDKSRWQQGNVFSCSVMHEALHNHYTQKSLSLSPGGSPGVPLSLYSG |
| | | PAPTSSSTKKTQLQLEHLLLDLQMILNGINNYKNPKLTRMLTAKFYMPKKATELKHLQCL |
| | | EEELKPLEEVLNLAQSKNFHLRPRDLISNINVIVLELKGSETTFMCEYADETATIVEFLNRW |
| | | ITFAQSIISTLT |
| Polypeptide chain | 109 | DKTHTCPPCPAPELLGGPSVFLFPPKPKDTLMISRTPEVTCVVVDVSHEDPEVKFNWYVD |
| | | GVEVHNAKTKPREEQYASTYRVVSVLTVLHQDWLNGKEYKCKVSNKALPAPIEKTISKA |
| | | KGQPREPQVYTLPPCRDELTKNQVSLWCLVKGFYPSDIAVEWESNGQPENNYKTTPPVL |
| | | DSDGSFFLYSKLTVDKSRWQQGNVFSCSVMHEALHNHYTQKSLSLSPGGSPGVPLSLYSG |
| | | PAPTSSSTKKTQLQLEHLLLDLQMILNGINNYKNPKLTRMLTFKFRMPKKATELKHLQCL |
| | | EEELKPLEEVLNLAQSKNFHLRPRDLISNINVIVLELKGSETTFMCEYADETATIVEFLNRW |
| | | ITFAQSIISTLT |
| Polypeptide chain | 110 | DKTHTCPPCPAPELLGGPSVFLFPPKPKDTLMISRTPEVTCVVVDVSHEDPEVKFNWYVD |
| | | GVEVHNAKTKPREEQYASTYRVVSVLTVLHQDWLNGKEYKCKVSNKALPAPIEKTISKA |
| | | KGQPREPQVYTLPPCRDELTKNQVSLWCLVKGFYPSDIAVEWESNGQPENNYKTTPPVL |
| | | DSDGSFFLYSKLTVDKSRWQQGNVFSCSVMHEALHNHYTQKSLSLSPGGSPGVPLSLYSG |
| | | PAPTSSSTKKTQLQLEHLLLDLQMILNGINNYKNPKLTRMLTSKFYMPKKATELKHLQCL |
| | | EESLKPLEEVLNLAQSKNFHLRPRDLISNINVIVLELKGSETTFMCEYADETATFVEFLNRW |
| | | ITFAQSIISTLT |
| Polypeptide chain | 111 | DKTHTCPPCPAPELLGGPSVFLFPPKPKDTLMISRTPEVTCVVVDVSHEDPEVKFNWYVD |
| | | GVEVHNAKTKPREEQYASTYRVVSVLTVLHQDWLNGKEYKCKVSNKALPAPIEKTISKA |
| | | KGQPREPQVYTLPPCRDELTKNQVSLWCLVKGFYPSDIAVEWESNGQPENNYKTTPPVL |
| | | DSDGSFFLYSKLTVDKSRWQQGNVFSCSVMHEALHNHYTQKSLSLSPGGSPGVPLSLYSG |
| | | PAPTSSSTKKTQLQLEHLLLDLQMILNGINNYKNPKLTRMLTFKFYMPKKATELKHLQCL |
| | | EEELKPLEEVLNLAQSKNFHLRPRDLISNINVIVLELKGSETTFMCEYADETATIVEFLNRW |
| | | ITFAQSIISTLT |

[0836] 12.2 List of Constructs

[0837] The table below shows the full sequences for molecules labelled by ‘AK’ reference number. The component parts of the sequence are also shown as well as the order in which they are assembled in the chains of the molecules. Individual chains are labelled by a ‘DNA’ reference number:

| [symbol] olecule | name | newnames | Component1Sequence |
|---|---|---|---|
| 368 | DNA187 | Hole: hFc(N297A)-hCD122 | DKTHTCPPCPAPELLGGPSVFLFPPKPKDTLMISRTPEVTCVVVDVSHEDP |
| | | | EVKFNWYVDGVEVHNAKTKPREEQYASTYRVVSVLTVLHQDWLNGKEYK |
| | | | CKVSNKALPAPIEKTISKAKGQPREPQVCTLPPSRDELTKNQVSLSCAVKGF |
| | | | YPSDIAVEWESNGQPENNYKTTPPVLDSDGSFFLVSKLTVDKSRWQQGN |
| | | | VFSCSVMHEALHNHYTQKSLSLSPG |
| 368 | DNA476 | Knob: hFc(N297A)- | DKTHTCPPCPAPELLGGPSVFLFPPKPKDTLMISRTPEVTCVVVDVSHEDP |
| | | [NPMGSDPVNFKLLRVVNG]- | EVKFNWYVDGVEVHNAKTKPREEQYASTYRVVSVLTVLHQDWLNGKEYK |
| | | hIL2(F42S, E62S, C125A) | CKVSNKALPAPIEKTISKAKGQPREPQVYTLPPCRDELTKNQVSLWCLVKG |
| | | | FYPSDIAVEWESNGQPENNYKTTPPVLDSDGSFFLYSKLTVDKSRWQQGN |
| | | | VFSCSVMHEALHNHYTQKSLSLSPG |
| 375 | DNA477 | Knob: mFcIgG2a(LALAPG)- | TIKPCPPCKCPAPNAAGGPSVFIFPPKIKDVLMISLSPIVTCVVVDVSEDDPD |
| | | hIL2(R38A, F42A, Y45A, | VQISWFVNNVEVHTAQTQTHREDYNSTLRVVSALPIQHQDWMSGKEFK |
| | | E62A, C125A) | CKVNNKDLGAPIERTISKPKGSVRAPQVYVLPPCEEEMTKKQVTLWCMVT |
| | | | DFMPEDIYVEWTNNGKTELNYKNTEPVLDSDGSYFMYSKLRVEKKNWVE |
| | | | RNSYSCSVVHEGLHNHHTTKSFSRTPG |
| 375 | DNA479 | Hole: mFcIgG2a(LALAPG) | TIKPCPPCKCPAPNAAGGPSVFIFPPKIKDVLMISLSPIVTCVVVDVSEDDPD |
| | | | VQISWFVNNVEVHTAQTQTHREDYNSTLRVVSALPIQHQDWMSGKEFK |
| | | | CKVNNKDLGAPIERTISKPKGSVRAPQVCVLPPPEEEMTKKQVTLSCAVTD |
| | | | FMPEDIYVEWTNNGKTELNYKNTEPVLDSDGSYFMVSKLRVEKKNWVER |
| | | | NSYSCSVVHEGLHNHHTTKSFSRTPG |
| 376 | DNA478 | Knob: mFcIgG2a(LALAPG)- | TIKPCPPCKCPAPNAAGGPSVFIFPPKIKDVLMISLSPIVTCVVVDVSEDDPD |
| | | [VPLSLY]-hIL2(R38A, F42A, | VQISWFVNNVEVHTAQTQTHREDYNSTLRVVSALPIQHQDWMSGKEFK |
| | | Y45A, E62A, C125A) | CKVNNKDLGAPIERTISKPKGSVRAPQVYVLPPCEEEMTKKQVTLWCMVT |
| | | | DFMPEDIYVEWTNNGKTELNYKNTEPVLDSDGSYFMYSKLRVEKKNWVE |
| | | | RNSYSCSVVHEGLHNHHTTKSFSRTPG |
| 376 | DNA479 | Hole: mFcIgG2a(LALAPG) | TIKPCPPCKCPAPNAAGGPSVFIFPPKIKDVLMISLSPIVTCVVVDVSEDDPD |
| | | | VQISWFVNNVEVHTAQTQTHREDYNSTLRVVSALPIQHQDWMSGKEFK |
| | | | CKVNNKDLGAPIERTISKPKGSVRAPQVCVLPPPEEEMTKKQVTLSCAVTD |
| | | | FMPEDIYVEWTNNGKTELNYKNTEPVLDSDGSYFMVSKLRVEKKNWVER |
| | | | NSYSCSVVHEGLHNHHTTKSFSRTPG |
| 377 | DNA477 | Knob: mFcIgG2a(LALAPG)- | TIKPCPPCKCPAPNAAGGPSVFIFPPKIKDVLMISLSPIVTCVVVDVSEDDPD |
| | | hIL2(R38A, F42A, Y45A, | VQISWFVNNVEVHTAQTQTHREDYNSTLRVVSALPIQHQDWMSGKEFK |
| | | E62A, C125A) | CKVNNKDLGAPIERTISKPKGSVRAPQVYVLPPCEEEMTKKQVTLWCMVT |
| | | | DFMPEDIYVEWTNNGKTELNYKNTEPVLDSDGSYFMYSKLRVEKKNWVE |
| | | | RNSYSCSVVHEGLHNHHTTKSFSRTPG |
| 377 | DNA480 | Hole: mFcIgG2a(LALAPG)- | TIKPCPPCKCPAPNAAGGPSVFIFPPKIKDVLMISLSPIVTCVVVDVSEDDPD |
| | | hCD122 | VQISWFVNNVEVHTAQTQTHREDYNSTLRVVSALPIQHQDWMSGKEFK |
| | | | CKVNNKDLGAPIERTISKPKGSVRAPQVCVLPPPEEEMTKKQVTLSCAVTD |
| | | | FMPEDIYVEWTNNGKTELNYKNTEPVLDSDGSYFMVSKLRVEKKNWVER |
| | | | NSYSCSVVHEGLHNHHTTKSFSRTPG |
| 378 | DNA478 | [VPLSLY]-hIL2(R38A, F42A, | TIKPCPPCKCPAPNAAGGPSVFIFPPKIKDVLMISLSPIVTCVVVDVSEDDPD |
| | | Y45A, E62A, C125A) | VQISWFVNNVEVHTAQTQTHREDYNSTLRVVSALPIQHQDWMSGKEFK |
| | | | CKVNNKDLGAPIERTISKPKGSVRAPQVYVLPPCEEEMTKKQVTLWCMVT |
| | | | DFMPEDIYVEWTNNGKTELNYKNTEPVLDSDGSYFMYSKLRVEKKNWVE |
| | | | RNSYSCSVVHEGLHNHHTTKSFSRTPG |
| 378 | DNA480 | Hole: mFcIgG2a(LALAPG)- | TIKPCPPCKCPAPNAAGGPSVFIFPPKIKDVLMISLSPIVTCVVVDVSEDDPD |
| | | hCD122 | VQISWFVNNVEVHTAQTQTHREDYNSTLRVVSALPIQHQDWMSGKEFK |
| | | | CKVNNKDLGAPIERTISKPKGSVRAPQVCVLPPPEEEMTKKQVTLSCAVTD |
| | | | FMPEDIYVEWTNNGKTELNYKNTEPVLDSDGSYFMVSKLRVEKKNWVER |
| | | | NSYSCSVVHEGLHNHHTTKSFSRTPG |
| 397 | DNA158 | Hole: hFc(N297A) | DKTHTCPPCPAPELLGGPSVFLFPPKPKDTLMISRTPEVTCVVVDVSHEDP |
| | | | EVKFNWYVDGVEVHNAKTKPREEQYASTYRVVSVLTVLHQDWLNGKEYK |
| | | | CKVSNKALPAPIEKTISKAKGQPREPQVCTLPPSRDELTKNQVSLSCAVKGF |
| | | | YPSDIAVEWESNGQPENNYKTTPPVLDSDGSFFLVSKLTVDKSRWQQGN |
| | | | VFSCSVMHEALHNHYTQKSLSLSPG |
| | | Knob: hFc(N297A)-[DSGGFMLT]- | DKTHTCPPCPAPELLGGPSVFLFPPKPKDTLMISRTPEVTCVVVDVSHEDP |
| 397 | DNA278 | hIL2(C125A) | EVKFNWYVDGVEVHNAKTKPREEQYASTYRVVSVLTVLHQDWLNGKEYK |
| | | | CKVSNKALPAPIEKTISKAKGQPREPQVYTLPPCRDELTKNQVSLWCLVKG |
| | | | FYPSDIAVEWESNGQPENNYKTTPPVLDSDGSFFLYSKLTVDKSRWQQGN |
| | | | VFSCSVMHEALHNHYTQKSLSLSPG |
| 429 | DNA477 | Knob: mFcIgG2a(LALAPG)- | TIKPCPPCKCPAPNAAGGPSVFIFPPKIKDVLMISLSPIVTCVVVDVSEDDPD |
| | | hIL2(R38A, F42A, Y45A, E62A, | VQISWFVNNVEVHTAQTQTHREDYNSTLRVVSALPIQHQDWMSGKEFK |
| | | C125A) | CKVNNKDLGAPIERTISKPKGSVRAPQVYVLPPCEEEMTKKQVTLWCMVT |
| | | | DFMPEDIYVEWTNNGKTELNYKNTEPVLDSDGSYFMYSKLRVEKKNWVE |
| | | | RNSYSCSVVHEGLHNHHTTKSFSRTPG |
| 429 | DNA520 | Hole: mFcIgG2a(LALAPG)- | TIKPCPPCKCPAPNAAGGPSVFIFPPKIKDVLMISLSPIVTCVVVDVSEDDPD |
| | | NoAnnotationFound | VQISWFVNNVEVHTAQTQTHREDYNSTLRVVSALPIQHQDWMSGKEFK |
| | | | CKVNNKDLGAPIERTISKPKGSVRAPQVCVLPPPEEEMTKKQVTLSCAVTD |
| | | | FMPEDIYVEWTNNGKTELNYKNTEPVLDSDGSYFMVSKLRVEKKNWVER |
| | | | NSYSCSVVHEGLHNHHTTKSFSRTPG |
| 430 | DNA477 | Knob: mFcIgG2a(LALAPG)- | TIKPCPPCKCPAPNAAGGPSVFIFPPKIKDVLMISLSPIVTCVVVDVSEDDPD |
| | | hIL2(R38A, F42A, Y45A, E62A, | VQISWFVNNVEVHTAQTQTHREDYNSTLRVVSALPIQHQDWMSGKEFK |
| | | C125A) | CKVNNKDLGAPIERTISKPKGSVRAPQVYVLPPCEEEMTKKQVTLWCMVT |
| | | | DFMPEDIYVEWTNNGKTELNYKNTEPVLDSDGSYFMYSKLRVEKKNWVE |
| | | | RNSYSCSVVHEGLHNHHTTKSFSRTPG |
| 430 | DNA521 | Hole: mFcIgG2a(LALAPG)- | TIKPCPPCKCPAPNAAGGPSVFIFPPKIKDVLMISLSPIVTCVVVDVSEDDPD |
| | | hCD122-NoAnnotationFound | VQISWFVNNVEVHTAQTQTHREDYNSTLRVVSALPIQHQDWMSGKEFK |
| | | | CKVNNKDLGAPIERTISKPKGSVRAPQVCVLPPPEEEMTKKQVTLSCAVTD |
| | | | FMPEDIYVEWTNNGKTELNYKNTEPVLDSDGSYFMVSKLRVEKKNWVER |
| | | | NSYSCSVVHEGLHNHHTTKSFSRTPG |
| 431 | DNA477 | Knob: mFcIgG2a(LALAPG)- | TIKPCPPCKCPAPNAAGGPSVFIFPPKIKDVLMISLSPIVTCVVVDVSEDDPD |
| | | hIL2(R38A, F42A, Y45A, E62A, | VQISWFVNNVEVHTAQTQTHREDYNSTLRVVSALPIQHQDWMSGKEFK |
| | | C125A) | CKVNNKDLGAPIERTISKPKGSVRAPQVYVLPPCEEEMTKKQVTLWCMVT |
| | | | DFMPEDIYVEWTNNGKTELNYKNTEPVLDSDGSYFMYSKLRVEKKNWVE |
| | | | RNSYSCSVVHEGLHNHHTTKSFSRTPG |
| 431 | DNA522 | Hole: mFcIgG2a(LALAPG)- | TIKPCPPCKCPAPNAAGGPSVFIFPPKIKDVLMISLSPIVTCVVVDVSEDDPD |
| | | mCD122-NoAnnotationFound | VQISWFVNNVEVHTAQTQTHREDYNSTLRVVSALPIQHQDWMSGKEFK |
| | | | CKVNNKDLGAPIERTISKPKGSVRAPQVCVLPPPEEEMTKKQVTLSCAVTD |
| | | | FMPEDIYVEWTNNGKTELNYKNTEPVLDSDGSYFMVSKLRVEKKNWVER |
| | | | NSYSCSVVHEGLHNHHTTKSFSRTPG |
| 432 | DNA478 | Knob: mFcIgG2a(LALAPG)- | TIKPCPPCKCPAPNAAGGPSVFIFPPKIKDVLMISLSPIVTCVVVDVSEDDPD |
| | | [VPLSLY]-hIL2(R38A, F42A, | VQISWFVNNVEVHTAQTQTHREDYNSTLRVVSALPIQHQDWMSGKEFK |
| | | Y45A, E62A, C125A) | CKVNNKDLGAPIERTISKPKGSVRAPQVYVLPPCEEEMTKKQVTLWCMVT |
| | | | DFMPEDIYVEWTNNGKTELNYKNTEPVLDSDGSYFMYSKLRVEKKNWVE |
| | | | RNSYSCSVVHEGLHNHHTTKSFSRTPG |
| 432 | DNA521 | Hole: mFcIgG2a(LALAPG)- | TIKPCPPCKCPAPNAAGGPSVFIFPPKIKDVLMISLSPIVTCVVVDVSEDDPD |
| | | hCD122-NoAnnotationFound | VQISWFVNNVEVHTAQTQTHREDYNSTLRVVSALPIQHQDWMSGKEFK |
| | | | CKVNNKDLGAPIERTISKPKGSVRAPQVCVLPPPEEEMTKKQVTLSCAVTD |
| | | | FMPEDIYVEWTNNGKTELNYKNTEPVLDSDGSYFMVSKLRVEKKNWVER |
| | | | NSYSCSVVHEGLHNHHTTKSFSRTPG |
| 433 | DNA478 | Knob: mFcIgG2a(LALAPG)- | TIKPCPPCKCPAPNAAGGPSVFIFPPKIKDVLMISLSPIVTCVVVDVSEDDPD |
| | | [VPLSLY]-hIL2(R38A, F42A, | VQISWFVNNVEVHTAQTQTHREDYNSTLRVVSALPIQHQDWMSGKEFK |
| | | Y45A, E62A, C125A) | CKVNNKDLGAPIERTISKPKGSVRAPQVYVLPPCEEEMTKKQVTLWCMVT |
| | | | DFMPEDIYVEWTNNGKTELNYKNTEPVLDSDGSYFMYSKLRVEKKNWVE |
| | | | RNSYSCSVVHEGLHNHHTTKSFSRTPG |
| 433 | DNA522 | Hole: mFcIgG2a(LALAPG)- | TIKPCPPCKCPAPNAAGGPSVFIFPPKIKDVLMISLSPIVTCVVVDVSEDDPD |
| | | mCD122-NoAnnotationFound | VQISWFVNNVEVHTAQTQTHREDYNSTLRVVSALPIQHQDWMSGKEFK |
| | | | CKVNNKDLGAPIERTISKPKGSVRAPQVCVLPPPEEEMTKKQVTLSCAVTD |
| | | | FMPEDIYVEWTNNGKTELNYKNTEPVLDSDGSYFMVSKLRVEKKNWVER |
| | | | NSYSCSVVHEGLHNHHTTKSFSRTPG |
| 435 | DNA263 | Knob: hFc(N297A)-[VPLSLY]- | DKTHTCPPCPAPELLGGPSVFLFPPKPKDTLMISRTPEVTCVVVDVSHEDP |
| | | hIL2(R38A, F42A, Y45A, E62A, | EVKFNWYVDGVEVHNAKTKPREEQYASTYRVVSVLTVLHQDWLNGKEYK |
| | | C125A) | CKVSNKALPAPIEKTISKAKGQPREPQVYTLPPCRDELTKNQVSLWCLVKG |
| | | | FYPSDIAVEWESNGQPENNYKTTPPVLDSDGSFFLYSKLTVDKSRWQQGN |
| | | | VFSCSVMHEALHNHYTQKSLSLSPG |
| 435 | DNA516 | F8ScFvVersion1-Hole: | EVQLLESGGGLVQPGGSLRLSCAASGFTFSLFTMSVVVRQAPGKGLEVVV |
| | | hFc(N297A)-hCD122 | SAISGSGGSTYYADSVKGRFTISRDNSKNTLYLQMNSLRAEDTAVYYCAKS |
| | | | THLYLFDYWGQGTLVTVSSGGGGSGGGGSGGGGSEIVLTQSPGTLSLSPG |
| | | | ERATLSCRASQSVSMPFLAWYQQKPGQAPRLLIYGASSRATGIPDRFSGS |
| | | | GSGTDFTLTISRLEPEDFAVYYCQQMRGRPPTFGQGTKVEIK |
| 436 | DNA187 | Hole: hFc(N297A)-hCD122 | DKTHTCPPCPAPELLGGPSVFLFPPKPKDTLMISRTPEVTCVVVDVSHEDP |
| | | | EVKFNWYVDGVEVHNAKTKPREEQYASTYRVVSVLTVLHQDWLNGKEYK |
| | | | CKVSNKALPAPIEKTISKAKGQPREPQVCTLPPSRDELTKNQVSLSCAVKGF |
| | | | YPSDIAVEWESNGQPENNYKTTPPVLDSDGSFFLVSKLTVDKSRWQQGN |
| | | | VFSCSVMHEALHNHYTQKSLSLSPG |
| 436 | DNA542 | Knob: hFc(N297A)-hIL2(R38A, | DKTHTCPPCPAPELLGGPSVFLFPPKPKDTLMISRTPEVTCVVVDVSHEDP |
| | | F42A, Y45A, E62A, C125A) | EVKFNWYVDGVEVHNAKTKPREEQYASTYRVVSVLTVLHQDWLNGKEYK |
| | | | CKVSNKALPAPIEKTISKAKGQPREPQVYTLPPCRDELTKNQVSLWCLVKG |
| | | | FYPSDIAVEWESNGQPENNYKTTPPVLDSDGSFFLYSKLTVDKSRWQQGN |
| | | | VFSCSVMHEALHNHYTQKSLSLSPG |
| 437 | DNA187 | Hole: hFc(N297A)-hCD122 | DKTHTCPPCPAPELLGGPSVFLFPPKPKDTLMISRTPEVTCVVVDVSHEDP |
| | | | EVKFNWYVDGVEVHNAKTKPREEQYASTYRVVSVLTVLHQDWLNGKEYK |
| | | | CKVSNKALPAPIEKTISKAKGQPREPQVCTLPPSRDELTKNQVSLSCAVKGF |
| | | | YPSDIAVEWESNGQPENNYKTTPPVLDSDGSFFLVSKLTVDKSRWQQGN |
| | | | VFSCSVMHEALHNHYTQKSLSLSPG |
| 437 | DNA545 | Knob: hFc(N297A)-hIL2(R38A, | DKTHTCPPCPAPELLGGPSVFLFPPKPKDTLMISRTPEVTCVVVDVSHEDP |
| | | F42A, Y45A, E62A, C125A) | EVKFNWYVDGVEVHNAKTKPREEQYASTYRVVSVLTVLHQDWLNGKEYK |
| | | | CKVSNKALPAPIEKTISKAKGQPREPQVYTLPPCRDELTKNQVSLWCLVKG |
| | | | FYPSDIAVEWESNGQPENNYKTTPPVLDSDGSFFLYSKLTVDKSRWQQGN |
| | | | VFSCSVMHEALHNHYTQKSLSLSPG |
| 438 | DNA255 | Knob: hFc(N297A)-hIL2(R38A, | DKTHTCPPCPAPELLGGPSVFLFPPKPKDTLMISRTPEVTCVVVDVSHEDP |
| | | F42A, Y45A, E62A, C125A) | EVKFNWYVDGVEVHNAKTKPREEQYASTYRVVSVLTVLHQDWLNGKEYK |
| | | | CKVSNKALPAPIEKTISKAKGQPREPQVYTLPPCRDELTKNQVSLWCLVKG |
| | | | FYPSDIAVEWESNGQPENNYKTTPPVLDSDGSFFLYSKLTVDKSRWQQGN |
| | | | VFSCSVMHEALHNHYTQKSLSLSPG |
| 438 | DNA543 | Hole: hFc(N297A)-[VPLSLY]- | DKTHTCPPCPAPELLGGPSVFLFPPKPKDTLMISRTPEVTCVVVDVSHEDP |
| | | hCD122 | EVKFNWYVDGVEVHNAKTKPREEQYASTYRVVSVLTVLHQDWLNGKEYK |
| | | | CKVSNKALPAPIEKTISKAKGQPREPQVCTLPPSRDELTKNQVSLSCAVKGF |
| | | | YPSDIAVEWESNGQPENNYKTTPPVLDSDGSFFLVSKLTVDKSRWQQGN |
| | | | VFSCSVMHEALHNHYTQKSLSLSPG |
| 439 | DNA158 | Hole: hFc(N297A) | DKTHTCPPCPAPELLGGPSVFLFPPKPKDTLMISRTPEVTCVVVDVSHEDP |
| | | | EVKFNWYVDGVEVHNAKTKPREEQYASTYRVVSVLTVLHQDWLNGKEYK |
| | | | CKVSNKALPAPIEKTISKAKGQPREPQVCTLPPSRDELTKNQVSLSCAVKGF |
| | | | YPSDIAVEWESNGQPENNYKTTPPVLDSDGSFFLVSKLTVDKSRWQQGN |
| | | | VFSCSVMHEALHNHYTQKSLSLSPG |
| 439 | DNA544 | Knob: hFc(N297A)-[VPLSLY]- | DKTHTCPPCPAPELLGGPSVFLFPPKPKDTLMISRTPEVTCVVVDVSHEDP |
| | | hIL2(R38A, F42A, Y45A, E62A, | EVKFNWYVDGVEVHNAKTKPREEQYASTYRVVSVLTVLHQDWLNGKEYK |
| | | L80F, R81D, L85V, I86V, I92F, | CKVSNKALPAPIEKTISKAKGQPREPQVYTLPPCRDELTKNQVSLWCLVKG |
| | | C125A) | FYPSDIAVEWESNGQPENNYKTTPPVLDSDGSFFLYSKLTVDKSRWQQGN |
| | | | VFSCSVMHEALHNHYTQKSLSLSPG |
| 440 | DNA187 | Hole: hFc(N297A)-hCD122 | DKTHTCPPCPAPELLGGPSVFLFPPKPKDTLMISRTPEVTCVVVDVSHEDP |
| | | | EVKFNWYVDGVEVHNAKTKPREEQYASTYRVVSVLTVLHQDWLNGKEYK |
| | | | CKVSNKALPAPIEKTISKAKGQPREPQVCTLPPSRDELTKNQVSLSCAVKGF |
| | | | YPSDIAVEWESNGQPENNYKTTPPVLDSDGSFFLVSKLTVDKSRWQQGN |
| | | | VFSCSVMHEALHNHYTQKSLSLSPG |
| 440 | DNA544 | Knob: hFc(N297A)-[VPLSLY]- | DKTHTCPPCPAPELLGGPSVFLFPPKPKDTLMISRTPEVTCVVVDVSHEDP |
| | | hIL2(R38A, F42A, Y45A, E62A, | EVKFNWYVDGVEVHNAKTKPREEQYASTYRVVSVLTVLHQDWLNGKEYK |
| | | L80F, R81D, L85V, I86V, I92F, | CKVSNKALPAPIEKTISKAKGQPREPQVYTLPPCRDELTKNQVSLWCLVKG |
| | | C125A) | FYPSDIAVEWESNGQPENNYKTTPPVLDSDGSFFLYSKLTVDKSRWQQGN |
| | | | VFSCSVMHEALHNHYTQKSLSLSPG |
| 441 | DNA543 | Hole: hFc(N297A)-[VPLSLY]- | DKTHTCPPCPAPELLGGPSVFLFPPKPKDTLMISRTPEVTCVVVDVSHEDP |
| | | hCD122 | EVKFNWYVDGVEVHNAKTKPREEQYASTYRVVSVLTVLHQDWLNGKEYK |
| | | | CKVSNKALPAPIEKTISKAKGQPREPQVCTLPPSRDELTKNQVSLSCAVKGF |
| | | | YPSDIAVEWESNGQPENNYKTTPPVLDSDGSFFLVSKLTVDKSRWQQGN |
| | | | VFSCSVMHEALHNHYTQKSLSLSPG |
| 441 | DNA546 | Knob: hFc(N297A)-hIL2(R38A, | DKTHTCPPCPAPELLGGPSVFLFPPKPKDTLMISRTPEVTCVVVDVSHEDP |
| | | F42A, Y45A, E62A, L80F, R81D, | EVKFNWYVDGVEVHNAKTKPREEQYASTYRVVSVLTVLHQDWLNGKEYK |
| | | L85V, I86V, I92F, C125A) | CKVSNKALPAPIEKTISKAKGQPREPQVYTLPPCRDELTKNQVSLWCLVKG |
| | | | FYPSDIAVEWESNGQPENNYKTTPPVLDSDGSFFLYSKLTVDKSRWQQGN |
| | | | VFSCSVMHEALHNHYTQKSLSLSPG |
| 442 | DNA255 | Knob: hFc(N297A)-hIL2(R38A, | DKTHTCPPCPAPELLGGPSVFLFPPKPKDTLMISRTPEVTCVVVDVSHEDP |
| | | F42A, Y45A, E62A, C125A) | EVKFNWYVDGVEVHNAKTKPREEQYASTYRVVSVLTVLHQDWLNGKEYK |
| | | | CKVSNKALPAPIEKTISKAKGQPREPQVYTLPPCRDELTKNQVSLWCLVKG |
| | | | FYPSDIAVEWESNGQPENNYKTTPPVLDSDGSFFLYSKLTVDKSRWQQGN |
| | | | VFSCSVMHEALHNHYTQKSLSLSPG |
| 442 | DNA553 | Hole: hFc(N297A)-[DSGGFMLT]- | DKTHTCPPCPAPELLGGPSVFLFPPKPKDTLMISRTPEVTCVVVDVSHEDP |
| | | hCD122 | EVKFNWYVDGVEVHNAKTKPREEQYASTYRVVSVLTVLHQDWLNGKEYK |
| | | | CKVSNKALPAPIEKTISKAKGQPREPQVCTLPPSRDELTKNQVSLSCAVKGF |
| | | | YPSDIAVEWESNGQPENNYKTTPPVLDSDGSFFLVSKLTVDKSRWQQGN |
| | | | VFSCSVMHEALHNHYTQKSLSLSPG |
| 443 | DNA187 | Hole: hFc(N297A)-hCD122 | DKTHTCPPCPAPELLGGPSVFLFPPKPKDTLMISRTPEVTCVVVDVSHEDP |
| | | | EVKFNWYVDGVEVHNAKTKPREEQYASTYRVVSVLTVLHQDWLNGKEYK |
| | | | CKVSNKALPAPIEKTISKAKGQPREPQVCTLPPSRDELTKNQVSLSCAVKGF |
| | | | YPSDIAVEWESNGQPENNYKTTPPVLDSDGSFFLVSKLTVDKSRWQQGN |
| | | | VFSCSVMHEALHNHYTQKSLSLSPG |
| 443 | DNA554 | Knob: hFc(N297A)-[VPLSLY]- | DKTHTCPPCPAPELLGGPSVFLFPPKPKDTLMISRTPEVTCVVVDVSHEDP |
| | | hIL2(E15R, L18C, D20R, R38A, | EVKFNWYVDGVEVHNAKTKPREEQYASTYRVVSVLTVLHQDWLNGKEYK |
| | | F42A, Y45A, E62A) | CKVSNKALPAPIEKTISKAKGQPREPQVYTLPPCRDELTKNQVSLWCLVKG |
| | | | FYPSDIAVEWESNGQPENNYKTTPPVLDSDGSFFLYSKLTVDKSRWQQGN |
| | | | VFSCSVMHEALHNHYTQKSLSLSPG |
| 444 | DNA281 | Knob: hFc(N297A)-[DSGGFMLT]- | DKTHTCPPCPAPELLGGPSVFLFPPKPKDTLMISRTPEVTCVVVDVSHEDP |
| | | hIL2(R38A, F42A, Y45A, E62A, | EVKFNWYVDGVEVHNAKTKPREEQYASTYRVVSVLTVLHQDWLNGKEYK |
| | | C125A) | CKVSNKALPAPIEKTISKAKGQPREPQVYTLPPCRDELTKNQVSLWCLVKG |
| | | | FYPSDIAVEWESNGQPENNYKTTPPVLDSDGSFFLYSKLTVDKSRWQQGN |
| | | | VFSCSVMHEALHNHYTQKSLSLSPG |
| 444 | DNA440 | Hole: hFc(N297A)- | DKTHTCPPCPAPELLGGPSVFLFPPKPKDTLMISRTPEVTCVVVDVSHEDP |
| | | hCD122(C122S, C168S) | EVKFNWYVDGVEVHNAKTKPREEQYASTYRVVSVLTVLHQDWLNGKEYK |
| | | | CKVSNKALPAPIEKTISKAKGQPREPQVCTLPPSRDELTKNQVSLSCAVKGF |
| | | | YPSDIAVEWESNGQPENNYKTTPPVLDSDGSFFLVSKLTVDKSRWQQGN |
| | | | VFSCSVMHEALHNHYTQKSLSLSPG |
| 449 | DNA547 | Hole: hFcIgG1(N297A + EPKSS)- | EPKSSDKTHTCPPCPAPELLGGPSVFLFPPKPKDTLMISRTPEVTCVVVDVS |
| | | Hole: hFc(N297A)-hCD122 | HEDPEVKFNWYVDGVEVHNAKTKPREEQYASTYRVVSVLTVLHQDWLN |
| | | | GKEYKCKVSNKALPAPIEKTISKAKGQPREPQVCTLPPSRDELTKNQVSLSC |
| | | | AVKGFYPSDIAVEWESNGQPENNYKTTPPVLDSDGSFFLVSKLTVDKSRW |
| | | | QQGNVFSCSVMHEALHNHYTQKSLSLSPG |
| 449 | DNA550 | Knob: hFcIgG1(N297A + EPKSS)- | EPKSSDKTHTCPPCPAPELLGGPSVFLFPPKPKDTLMISRTPEVTCVVVDVS |
| | | hIL2(R38A, F42A, Y45A, E62A, | HEDPEVKFNWYVDGVEVHNAKTKPREEQYASTYRVVSVLTVLHQDWLN |
| | | C125A) | GKEYKCKVSNKALPAPIEKTISKAKGQPREPQVYTLPPCRDELTKNQVSLW |
| | | | CLVKGFYPSDIAVEWESNGQPENNYKTTPPVLDSDGSFFLYSKLTVDKSR |
| | | | WQQGNVFSCSVMHEALHNHYTQKSLSLSPG |
| 450 | DNA548 | Hole: hFcIgG1(N297A + AKT)- | AKTDKTHTCPPCPAPELLGGPSVFLFPPKPKDTLMISRTPEVTCVVVDVSHE |
| | | Hole: hFc(N297A)-hCD122 | DPEVKFNWYVDGVEVHNAKTKPREEQYASTYRVVSVLTVLHQDWLNGK |
| | | | EYKCKVSNKALPAPIEKTISKAKGQPREPQVCTLPPSRDELTKNQVSLSCAV |
| | | | KGFYPSDIAVEWESNGQPENNYKTTPPVLDSDGSFFLVSKLTVDKSRWQQ |
| | | | GNVFSCSVMHEALHNHYTQKSLSLSPG |
| 450 | DNA551 | Knob: hFcIgG1(N297A + AKT)- | AKTDKTHTCPPCPAPELLGGPSVFLFPPKPKDTLMISRTPEVTCVVVDVSHE |
| | | [VPLSLY]-hIL2(R38A, F42A, | DPEVKFNWYVDGVEVHNAKTKPREEQYASTYRVVSVLTVLHQDWLNGK |
| | | Y45A, E62A, C125A) | EYKCKVSNKALPAPIEKTISKAKGQPREPQVYTLPPCRDELTKNQVSLWCLV |
| | | | KGFYPSDIAVEWESNGQPENNYKTTPPVLDSDGSFFLYSKLTVDKSRWQQ |
| | | | GNVFSCSVMHEALHNHYTQKSLSLSPG |
| 451 | DNA549 | Hole: hFcIgG1(N297A + | AKTEPKSSDKTHTCPPCPAPELLGGPSVFLFPPKPKDTLMISRTPEVTCVVV |
| | | AKTEPKSS)-hCD122 | DVSHEDPEVKFNWYVDGVEVHNAKTKPREEQYASTYRVVSVLTVLHQD |
| | | | WLNGKEYKCKVSNKALPAPIEKTISKAKGQPREPQVCTLPPSRDELTKNQV |
| | | | SLSCAVKGFYPSDIAVEWESNGQPENNYKTTPPVLDSDGSFFLVSKLTVDK |
| | | | SRWQQGNVFSCSVMHEALHNHYTQKSLSLSPG |
| 451 | DNA552 | Knob : hFcIgG1(N297A + | AKTEPKSSDKTHTCPPCPAPELLGGPSVFLFPPKPKDTLMISRTPEVTCVVV |
| | | AKTEPKSS)-[VPLSLY]-hIL2(R38A, | DVSHEDPEVKFNWYVDGVEVHNAKTKPREEQYASTYRVVSVLTVLHQD |
| | | F42A, Y45A, E62A, C125A) | WLNGKEYKCKVSNKALPAPIEKTISKAKGQPREPQVYTLPPCRDELTKNQV |
| | | | SLWCLVKGFYPSDIAVEWESNGQPENNYKTTPPVLDSDGSFFLYSKLTVDK |
| | | | SRWQQGNVFSCSVMHEALHNHYTQKSLSLSPG |
| 452 | DNA187 | Hole: hFc(N297A)-hCD122 | DKTHTCPPCPAPELLGGPSVFLFPPKPKDTLMISRTPEVTCVVVDVSHEDP |
| | | | EVKFNWYVDGVEVHNAKTKPREEQYASTYRVVSVLTVLHQDWLNGKEYK |
| | | | CKVSNKALPAPIEKTISKAKGQPREPQVCTLPPSRDELTKNQVSLSCAVKGF |
| | | | YPSDIAVEWESNGQPENNYKTTPPVLDSDGSFFLVSKLTVDKSRWQQGN |
| | | | VFSCSVMHEALHNHYTQKSLSLSPG |
| 452 | DNA563 | Knob: hFc(N297A)-[VPLSLY]- | DKTHTCPPCPAPELLGGPSVFLFPPKPKDTLMISRTPEVTCVVVDVSHEDP |
| | | hIL2(E15R, L18C, D20R, R38A, | EVKFNWYVDGVEVHNAKTKPREEQYASTYRVVSVLTVLHQDWLNGKEYK |
| | | F42A, Y45A, E62A, N88L) | CKVSNKALPAPIEKTISKAKGQPREPQVYTLPPCRDELTKNQVSLWCLVKG |
| | | | FYPSDIAVEWESNGQPENNYKTTPPVLDSDGSFFLYSKLTVDKSRWQQGN |
| | | | VFSCSVMHEALHNHYTQKSLSLSPG |
| 453 | DNA187 | Hole: hFc(N297A)-hCD122 | DKTHTCPPCPAPELLGGPSVFLFPPKPKDTLMISRTPEVTCVVVDVSHEDP |
| | | | EVKFNWYVDGVEVHNAKTKPREEQYASTYRVVSVLTVLHQDWLNGKEYK |
| | | | CKVSNKALPAPIEKTISKAKGQPREPQVCTLPPSRDELTKNQVSLSCAVKGF |
| | | | YPSDIAVEWESNGQPENNYKTTPPVLDSDGSFFLVSKLTVDKSRWQQGN |
| | | | VFSCSVMHEALHNHYTQKSLSLSPG |
| 453 | DNA565 | Knob: hFc(N297A)-[VPLSLY]- | DKTHTCPPCPAPELLGGPSVFLFPPKPKDTLMISRTPEVTCVVVDVSHEDP |
| | | hIL2(E15L, L18C, D20R, R38A, | EVKFNWYVDGVEVHNAKTKPREEQYASTYRVVSVLTVLHQDWLNGKEYK |
| | | F42A, Y45A, E62A, N88L) | CKVSNKALPAPIEKTISKAKGQPREPQVYTLPPCRDELTKNQVSLWCLVKG |
| | | | FYPSDIAVEWESNGQPENNYKTTPPVLDSDGSFFLYSKLTVDKSRWQQGN |
| | | | VFSCSVMHEALHNHYTQKSLSLSPG |
| 454 | DNA187 | Hole: hFc(N297A)-hCD122 | DKTHTCPPCPAPELLGGPSVFLFPPKPKDTLMISRTPEVTCVVVDVSHEDP |
| | | | EVKFNWYVDGVEVHNAKTKPREEQYASTYRVVSVLTVLHQDWLNGKEYK |
| | | | CKVSNKALPAPIEKTISKAKGQPREPQVCTLPPSRDELTKNQVSLSCAVKGF |
| | | | YPSDIAVEWESNGQPENNYKTTPPVLDSDGSFFLVSKLTVDKSRWQQGN |
| | | | VFSCSVMHEALHNHYTQKSLSLSPG |
| 454 | DNA566 | Knob: hFc(N297A)-[VPLSLY]- | DKTHTCPPCPAPELLGGPSVFLFPPKPKDTLMISRTPEVTCVVVDVSHEDP |
| | | hIL2(E15R, L18C, R38A, F42A, | EVKFNWYVDGVEVHNAKTKPREEQYASTYRVVSVLTVLHQDWLNGKEYK |
| | | Y45A, E62A, N88L) | CKVSNKALPAPIEKTISKAKGQPREPQVYTLPPCRDELTKNQVSLWCLVKG |
| | | | FYPSDIAVEWESNGQPENNYKTTPPVLDSDGSFFLYSKLTVDKSRWQQGN |
| | | | VFSCSVMHEALHNHYTQKSLSLSPG |
| 455 | DNA187 | Hole: hFc(N297A)-hCD122 | DKTHTCPPCPAPELLGGPSVFLFPPKPKDTLMISRTPEVTCVVVDVSHEDP |
| | | | EVKFNWYVDGVEVHNAKTKPREEQYASTYRVVSVLTVLHQDWLNGKEYK |
| | | | CKVSNKALPAPIEKTISKAKGQPREPQVCTLPPSRDELTKNQVSLSCAVKGF |
| | | | YPSDIAVEWESNGQPENNYKTTPPVLDSDGSFFLVSKLTVDKSRWQQGN |
| | | | VFSCSVMHEALHNHYTQKSLSLSPG |
| 455 | DNA567 | Knob: hFc(N297A)-[VPLSLY]- | DKTHTCPPCPAPELLGGPSVFLFPPKPKDTLMISRTPEVTCVVVDVSHEDP |
| | | hIL2(L18C, D20R, R38A, F42A, | EVKFNWYVDGVEVHNAKTKPREEQYASTYRVVSVLTVLHQDWLNGKEYK |
| | | Y45A, E62A, N88L) | CKVSNKALPAPIEKTISKAKGQPREPQVYTLPPCRDELTKNQVSLWCLVKG |
| | | | FYPSDIAVEWESNGQPENNYKTTPPVLDSDGSFFLYSKLTVDKSRWQQGN |
| | | | VFSCSVMHEALHNHYTQKSLSLSPG |
| 456 | DNA187 | Hole: hFc(N297A)-hCD122 | DKTHTCPPCPAPELLGGPSVFLFPPKPKDTLMISRTPEVTCVVVDVSHEDP |
| | | | EVKFNWYVDGVEVHNAKTKPREEQYASTYRVVSVLTVLHQDWLNGKEYK |
| | | | CKVSNKALPAPIEKTISKAKGQPREPQVCTLPPSRDELTKNQVSLSCAVKGF |
| | | | YPSDIAVEWESNGQPENNYKTTPPVLDSDGSFFLVSKLTVDKSRWQQGN |
| | | | VFSCSVMHEALHNHYTQKSLSLSPG |
| 456 | DNA568 | Knob: hFc(N297A)-[VPLSLY]- | DKTHTCPPCPAPELLGGPSVFLFPPKPKDTLMISRTPEVTCVVVDVSHEDP |
| | | hIL2(E15F, L18C, D20R, R38A, | EVKFNWYVDGVEVHNAKTKPREEQYASTYRVVSVLTVLHQDWLNGKEYK |
| | | F42A, Y45A, E62A, N88L) | CKVSNKALPAPIEKTISKAKGQPREPQVYTLPPCRDELTKNQVSLWCLVKG |
| | | | FYPSDIAVEWESNGQPENNYKTTPPVLDSDGSFFLYSKLTVDKSRWQQGN |
| | | | VFSCSVMHEALHNHYTQKSLSLSPG |
| 462 | DNA530 | Knob: mFcIgG1(DAPG)- | VRSGCKPCICTVPEVSSVFIFPPKPKDVLTITLTPKVTCVVVAISKDDPEVQFS |
| | | hIL2(R38A, F42A, Y45A, E62A, | WFVDDVEVHTAQTQPREEQFNSTFRSVSELPIMHQDWLNGKEFKCRVN |
| | | C125A) | SAAFGAPIEKTISKTKGRPKAPQVYTIPPPKEQMAKDKVSLTCMITDFFPED |
| | | | ITVEWQWNGQPAENYDNTQPIMDTDGSYFVYSDLNVQKSNWEAGNTF |
| | | | TCSVLHEGLHNHHTEKSLSHSPG |
| 462 | DNA532 | Hole: mFcIgG1(DAPG) | VRSGCKPCICTVPEVSSVFIFPPKPKDVLTITLTPKVTCVVVAISKDDPEVQFS |
| | | | WFVDDVEVHTAQTQPREEQFNSTFRSVSELPIMHQDWLNGKEFKCRVN |
| | | | SAAFGAPIEKTISKTKGRPKAPQVYTIPPPKKQMAKDKVSLTCMITDFFPED |
| | | | ITVEWQWNGQPAENYKNTQPIMKTDGSYFVYSKLNVQKSNWEAGNTFT |
| | | | CSVLHEGLHNHHTEKSLSHSPG |
| 463 | DNA530 | Knob: mFcIgG1(DAPG)- | VRSGCKPCICTVPEVSSVFIFPPKPKDVLTITLTPKVTCVVVAISKDDPEVQFS |
| | | hIL2(R38A, F42A, Y45A, E62A, | WFVDDVEVHTAQTQPREEQFNSTFRSVSELPIMHQDWLNGKEFKCRVN |
| | | C125A) | SAAFGAPIEKTISKTKGRPKAPQVYTIPPPKEQMAKDKVSLTCMITDFFPED |
| | | | ITVEWQWNGQPAENYDNTQPIMDTDGSYFVYSDLNVQKSNWEAGNTF |
| | | | TCSVLHEGLHNHHTEKSLSHSPG |
| 463 | DNA533 | Hole: mFcIgG1(DAPG)-hCD122 | VRSGCKPCICTVPEVSSVFIFPPKPKDVLTITLTPKVTCVWAISKDDPEVQFS |
| | | | WFVDDVEVHTAQTQPREEQFNSTFRSVSELPIMHQDWLNGKEFKCRVN |
| | | | SAAFGAPIEKTISKTKGRPKAPQVYTIPPPKKQMAKDKVSLTCMITDFFPED |
| | | | ITVEWQWNGQPAENYKNTQPIMKTDGSYFVYSKLNVQKSNWEAGNTFT |
| | | | CSVLHEGLHNHHTEKSLSHSPG |
| 464 | DNA530 | Knob: mFcIgG1(DAPG)- | VRSGCKPCICTVPEVSSVFIFPPKPKDVLTITLTPKVTCVWAISKDDPEVQFS |
| | | hIL2(R38A, F42A, Y45A, E62A, | WFVDDVEVHTAQTQPREEQFNSTFRSVSELPIMHQDWLNGKEFKCRVN |
| | | C125A) | SAAFGAPIEKTISKTKGRPKAPQVYTIPPPKEQMAKDKVSLTCMITDFFPED |
| | | | ITVEWQWNGQPAENYDNTQPIMDTDGSYFVYSDLNVQKSNWEAGNTF |
| | | | TCSVLHEGLHNHHTEKSLSHSPG |
| 464 | DNA534 | Hole: mFcIgG1(DAPG)-mCD122 | VRSGCKPCICTVPEVSSVFIFPPKPKDVLTITLTPKVTCVVVAISKDDPEVQFS |
| | | | WFVDDVEVHTAQTQPREEQFNSTFRSVSELPIMHQDWLNGKEFKCRVN |
| | | | SAAFGAPIEKTISKTKGRPKAPQVYTIPPPKKQMAKDKVSLTCMITDFFPED |
| | | | ITVEWQWNGQPAENYKNTQPIMKTDGSYFVYSKLNVQKSNWEAGNTFT |
| | | | CSVLHEGLHNHHTEKSLSHSPG |
| 465 | DNA531 | Knob: mFcIgG1(DAPG)-[VPLSLY]- | VRSGCKPCICTVPEVSSVFIFPPKPKDVLTITLTPKVTCVVVAISKDDPEVQFS |
| | | hIL2(R38A, F42A, Y45A, E62A, | WFVDDVEVHTAQTQPREEQFNSTFRSVSELPIMHQDWLNGKEFKCRVN |
| | | C125A) | SAAFGAPIEKTISKTKGRPKAPQVYTIPPPKEQMAKDKVSLTCMITDFFPED |
| | | | ITVEWQWNGQPAENYDNTQPIMDTDGSYFVYSDLNVQKSNWEAGNTF |
| | | | TCSVLHEGLHNHHTEKSLSHSPG |
| 465 | DNA532 | Hole: mFcIgG1(DAPG) | VRSGCKPCICTVPEVSSVFIFPPKPKDVLTITLTPKVTCVVVAISKDDPEVQFS |
| | | | WFVDDVEVHTAQTQPREEQFNSTFRSVSELPIMHQDWLNGKEFKCRVN |
| | | | SAAFGAPIEKTISKTKGRPKAPQVYTIPPPKKQMAKDKVSLTCMITDFFPED |
| | | | ITVEWQWNGQPAENYKNTQPIMKTDGSYFVYSKLNVQKSNWEAGNTFT |
| | | | CSVLHEGLHNHHTEKSLSHSPG |
| 466 | DNA531 | Knob: mFcIgG1(DAPG)-[VPLSLY]- | VRSGCKPCICTVPEVSSVFIFPPKPKDVLTITLTPKVTCVVVAISKDDPEVQFS |
| | | hIL2(R38A, F42A, Y45A, E62A, | WFVDDVEVHTAQTQPREEQFNSTFRSVSELPIMHQDWLNGKEFKCRVN |
| | | C125A) | SAAFGAPIEKTISKTKGRPKAPQVYTIPPPKEQMAKDKVSLTCMITDFFPED |
| | | | ITVEWQWNGQPAENYDNTQPIMDTDGSYFVYSDLNVQKSNWEAGNTF |
| | | | TCSVLHEGLHNHHTEKSLSHSPG |
| 466 | DNA533 | Hole: mFcIgG1(DAPG)-hCD122 | VRSGCKPCICTVPEVSSVFIFPPKPKDVLTITLTPKVTCVVVAISKDDPEVQFS |
| | | | WFVDDVEVHTAQTQPREEQFNSTFRSVSELPIMHQDWLNGKEFKCRVN |
| | | | SAAFGAPIEKTISKTKGRPKAPQVYTIPPPKKQMAKDKVSLTCMITDFFPED |
| | | | ITVEWQWNGQPAENYKNTQPIMKTDGSYFVYSKLNVQKSNWEAGNTFT |
| | | | CSVLHEGLHNHHTEKSLSHSPG |
| 467 | DNA531 | Knob: mFcIgG1(DAPG)-[VPLSLY]- | VRSGCKPCICTVPEVSSVFIFPPKPKDVLTITLTPKVTCVVVAISKDDPEVQFS |
| | | hIL2(R38A, F42A, Y45A, E62A, | WFVDDVEVHTAQTQPREEQFNSTFRSVSELPIMHQDWLNGKEFKCRVN |
| | | C125A) | SAAFGAPIEKTISKTKGRPKAPQVYTIPPPKEQMAKDKVSLTCMITDFFPED |
| | | | ITVEWQWNGQPAENYDNTQPIMDTDGSYFVYSDLNVQKSNWEAGNTF |
| | | | TCSVLHEGLHNHHTEKSLSHSPG |
| 467 | DNA534 | Hole: mFcIgG1(DAPG)-mCD122 | VRSGCKPCICTVPEVSSVFIFPPKPKDVLTITLTPKVTCVVVAISKDDPEVQFS |
| | | | WFVDDVEVHTAQTQPREEQFNSTFRSVSELPIMHQDWLNGKEFKCRVN |
| | | | SAAFGAPIEKTISKTKGRPKAPQVYTIPPPKKQMAKDKVSLTCMITDFFPED |
| | | | ITVEWQWNGQPAENYKNTQPIMKTDGSYFVYSKLNVQKSNWEAGNTFT |
| | | | CSVLHEGLHNHHTEKSLSHSPG |
| 468 | DNA576 | Hole: hFc(N297A, M252Y, S254T, | DKTHTCPPCPAPELLGGPSVFLFPPKPKDTLYITREPEVTCVVVDVSHEDPE |
| | | T256E)-hCD122 | VKFNWYVDGVEVHNAKTKPREEQYASTYRVVSVLTVLHQDWLNGKEYK |
| | | | CKVSNKALPAPIEKTISKAKGQPREPQVCTLPPSRDELTKNQVSLSCAVKGF |
| | | | YPSDIAVEWESNGQPENNYKTTPPVLDSDGSFFLVSKLTVDKSRWQQGN |
| | | | VFSCSVMHEALHNHYTQKSLSLSPG |
| 468 | DNA580 | Knob: hFc(N297A, M252Y, | DKTHTCPPCPAPELLGGPSVFLFPPKPKDTLYITREPEVTCVVVDVSHEDPE |
| | | S254T, T256E)-[VPLSLY]- | VKFNWYVDGVEVHNAKTKPREEQYASTYRVVSVLTVLHQDWLNGKEYK |
| | | hIL2(R38A, F42A, Y45A, E62A, | CKVSNKALPAPIEKTISKAKGQPREPQVYTLPPCRDELTKNQVSLWCLVKG |
| | | C125A) | FYPSDIAVEWESNGQPENNYKTTPPVLDSDGSFFLYSKLTVDKSRWQQGN |
| | | | VFSCSVMHEALHNHYTQKSLSLSPG |
| 469 | DNA575 | Hole: hFc(N297A, I253A)- | DKTHTCPPCPAPELLGGPSVFLFPPKPKDTLMASRTPEVTCVVVDVSHEDP |
| | | hCD122 | EVKFNWYVDGVEVHNAKTKPREEQYASTYRVVSVLTVLHQDWLNGKEYK |
| | | | CKVSNKALPAPIEKTISKAKGQPREPQVCTLPPSRDELTKNQVSLSCAVKGF |
| | | | YPSDIAVEWESNGQPENNYKTTPPVLDSDGSFFLVSKLTVDKSRWQQGN |
| | | | VFSCSVMHEALHNHYTQKSLSLSPG |
| 469 | DNA577 | Knob: hFc(N297, I253A)- | DKTHTCPPCPAPELLGGPSVFLFPPKPKDTLMASRTPEVTCVVVDVSHEDP |
| | | hIL2(R38A, F42A, Y45A, E62A, | EVKFNWYVDGVEVHNAKTKPREEQYASTYRVVSVLTVLHQDWLNGKEYK |
| | | C125A) | CKVSNKALPAPIEKTISKAKGQPREPQVYTLPPCRDELTKNQVSLWCLVKG |
| | | | FYPSDIAVEWESNGQPENNYKTTPPVLDSDGSFFLYSKLTVDKSRWQQGN |
| | | | VFSCSVMHEALHNHYTQKSLSLSPG |
| 470 | DNA576 | Hole: hFc(N297A, M252Y, S254T, | DKTHTCPPCPAPELLGGPSVFLFPPKPKDTLYITREPEVTCVVVDVSHEDPE |
| | | T256E)-hCD122 | VKFNWYVDGVEVHNAKTKPREEQYASTYRVVSVLTVLHQDWLNGKEYK |
| | | | CKVSNKALPAPIEKTISKAKGQPREPQVCTLPPSRDELTKNQVSLSCAVKGF |
| | | | YPSDIAVEWESNGQPENNYKTTPPVLDSDGSFFLVSKLTVDKSRWQQGN |
| | | | VFSCSVMHEALHNHYTQKSLSLSPG |
| 470 | DNA578 | Knob: hFc(N297A, M252Y, | DKTHTCPPCPAPELLGGPSVFLFPPKPKDTLYITREPEVTCVVVDVSHEDPE |
| | | S254T, T256E)-hIL2(R38A, F42A, | VKFNWYVDGVEVHNAKTKPREEQYASTYRVVSVLTVLHQDWLNGKEYK |
| | | Y45A, E62A, C125A) | CKVSNKALPAPIEKTISKAKGQPREPQVYTLPPCRDELTKNQVSLWCLVKG |
| | | | FYPSDIAVEWESNGQPENNYKTTPPVLDSDGSFFLYSKLTVDKSRWQQGN |
| | | | VFSCSVMHEALHNHYTQKSLSLSPG |
| 471 | DNA575 | Hole: hFc(N297A, 253A) | DKTHTCPPCPAPELLGGPSVFLFPPKPKDTLMASRTPEVTCVVVDVSHEDP |
| | | hCD122 | EVKFNWYVDGVEVHNAKTKPREEQYASTYRVVSVLTVLHQDWLNGKEYK |
| | | | CKVSNKALPAPIEKTISKAKGQPREPQVCTLPPSRDELTKNQVSLSCAVKGF |
| | | | YPSDIAVEWESNGQPENNYKTTPPVLDSDGSFFLVSKLTVDKSRWQQGN |
| | | | VFSCSVMHEALHNHYTQKSLSLSPG |
| 471 | DNA579 | Knob: hFc(N297, I253A)-[VPLSLY] | DKTHTCPPCPAPELLGGPSVFLFPPKPKDTLMASRTPEVTCVVVDVSHEDP |
| | | hIL2(R38A, F42A, Y45A, E62A, | EVKFNWYDGVEVHNAKTKPREEQYASTRVVSVLTVLHQDWLNGKEYK |
| | | C125A) | CKVSNKALPAPIEKTISKAKGQPREPQVYTLPPCRDELTKNQVSLWCLVKG |
| | | | FYPSDIAVEWESNGQPENNYKTTPPVLDSDGSFFLYSKLTVDKSRWQQGN |
| | | | VFSCSVMHEALHNHYTQKSLSLSPG |
| 475 | DNA255 | Knob: hFc(N297A)-hIL2(R38A, | DKTHTCPPCPAPELLGGPSVFLFPPKPKDTLMISRTPEVTCVVVDVSHEDP |
| | | F42A, Y45A, E62A, C125A) | EVKFNWYVDGVEVHNAKTKPREEQYASTYRVVSVLTVLHQDWLNGKEYK |
| | | | CKVSNKALPAPIEKTISKAKGQPREPQVYTLPPCRDELTKNQVSLWCLVKG |
| | | | FYPSDIAVEWESNGQPENNYKTTPPVLDSDGSFFLYSKLTVDKSRWQQGN |
| | | | VFSCSVMHEALHNHYTQKSLSLSPG |
| 475 | DNA528 | Hole: hFc(N297A)- | DKTHTCPPCPAPELLGGPSVFLFPPKPKDTLMISRTPEVTCVVVDVSHEDP |
| | | hCD122(C168S) | EVKFNWYVDGVEVHNAKTKPREEQYASTYRVVSVLTVLHQDWLNGKEYK |
| | | | CKVSNKALPAPIEKTISKAKGQPREPQVCTLPPSRDELTKNQVSLSCAVKGF |
| | | | YPSDIAVEWESNGQPENNYKTTPPVLDSDGSFFLVSKLTVDKSRWQQGN |
| | | | VFSCSVMHEALHNHYTQKSLSLSPG |
| 476 | DNA263 | Knob: hFc(N297A)-[VPLSLY]- | DKTHTCPPCPAPELLGGPSVFLFPPKPKDTLMISRTPEVTCVVVDVSHEDP |
| | | hIL2(R38A, F42A, Y45A, E62A, | EVKFNWYVDGVEVHNAKTKPREEQYASTYRVVSVLTVLHQDWLNGKEYK |
| | | C125A) | CKVSNKALPAPIEKTISKAKGQPREPQVYTLPPCRDELTKNQVSLWCLVKG |
| | | | FYPSDIAVEWESNGQPENNYKTTPPVLDSDGSFFLYSKLTVDKSRWQQGN |
| | | | VFSCSVMHEALHNHYTQKSLSLSPG |
| 476 | DNA528 | Hole: hFc(N297A)- | DKTHTCPPCPAPELLGGPSVFLFPPKPKDTLMISRTPEVTCVVVDVSHEDP |
| | | hCD122(C168S) | EVKFNWYVDGVEVHNAKTKPREEQYASTYRVVSVLTVLHQDWLNGKEYK |
| | | | CKVSNKALPAPIEKTISKAKGQPREPQVCTLPPSRDELTKNQVSLSCAVKGF |
| | | | YPSDIAVEWESNGQPENNYKTTPPVLDSDGSFFLVSKLTVDKSRWQQGN |
| | | | VFSCSVMHEALHNHYTQKSLSLSPG |
| 477 | DNA158 | Hole: hFc(N297A) | DKTHTCPPCPAPELLGGPSVFLFPPKPKDTLMISRTPEVTCVVVDVSHEDP |
| | | | EVKFNWYVDGVEVHNAKTKPREEQYASTYRVVSVLTVLHQDWLNGKEYK |
| | | | CKVSNKALPAPIEKTISKAKGQPREPQVCTLPPSRDELTKNQVSLSCAVKGF |
| | | | YPSDIAVEWESNGQPENNYKTTPPVLDSDGSFFLVSKLTVDKSRWQQGN |
| | | | VFSCSVMHEALHNHYTQKSLSLSPG |
| 477 | DNA554 | Knob: hFc(N297A)-[VPLSLY]- | DKTHTCPPCPAPELLGGPSVFLFPPKPKDTLMISRTPEVTCVVVDVSHEDP |
| | | hIL2(E15R, L18C, D20R, R38A, | EVKFNWYVDGVEVHNAKTKPREEQYASTYRVVSVLTVLHQDWLNGKEYK |
| | | F42A, Y45A, E62A) | CKVSNKALPAPIEKTISKAKGQPREPQVYTLPPCRDELTKNQVSLWCLVKG |
| | | | FYPSDIAVEWESNGQPENNYKTTPPVLDSDGSFFLYSKLTVDKSRWQQGN |
| | | | VFSCSVMHEALHNHYTQKSLSLSPG |
| 484 | DNA158 | Hole: hFc(N297A) | DKTHTCPPCPAPELLGGPSVFLFPPKPKDTLMISRTPEVTCVVVDVSHEDP |
| | | | EVKFNWYVDGVEVHNAKTKPREEQYASTYRVVSVLTVLHQDWLNGKEYK |
| | | | CKVSNKALPAPIEKTISKAKGQPREPQVCTLPPSRDELTKNQVSLSCAVKGF |
| | | | YPSDIAVEWESNGQPENNYKTTPPVLDSDGSFFLVSKLTVDKSRWQQGN |
| | | | VFSCSVMHEALHNHYTQKSLSLSPG |
| 484 | DNA581 | Knob: hFc(N297A)-[VPLSLY]- | DKTHTCPPCPAPELLGGPSVFLFPPKPKDTLMISRTPEVTCVVVDVSHEDP |
| | | hIL2(L18C, R38A, F42A, Y45A, | EVKFNWYVDGVEVHNAKTKPREEQYASTYRVVSVLTVLHQDWLNGKEYK |
| | | E62A) | CKVSNKALPAPIEKTISKAKGQPREPQVYTLPPCRDELTKNQVSLWCLVKG |
| | | | FYPSDIAVEWESNGQPENNYKTTPPVLDSDGSFFLYSKLTVDKSRWQQGN |
| | | | VFSCSVMHEALHNHYTQKSLSLSPG |
| 485 | DNA158 | Hole: hFc(N297A) | DKTHTCPPCPAPELLGGPSVFLFPPKPKDTLMISRTPEVTCVVVDVSHEDP |
| | | | EVKFNWYVDGVEVHNAKTKPREEQYASTYRVVSVLTVLHQDWLNGKEYK |
| | | | CKVSNKALPAPIEKTISKAKGQPREPQVCTLPPSRDELTKNQVSLSCAVKGF |
| | | | YPSDIAVEWESNGQPENNYKTTPPVLDSDGSFFLVSKLTVDKSRWQQGN |
| | | | VFSCSVMHEALHNHYTQKSLSLSPG |
| 485 | DNA582 | Knob: hFc(N297A)-[VPLSLY]- | DKTHTCPPCPAPELLGGPSVFLFPPKPKDTLMISRTPEVTCVVVDVSHEDP |
| | | hIL2(H16Y, R38A, F42A, Y45A, | EVKFNWYVDGVEVHNAKTKPREEQYASTYRVVSVLTVLHQDWLNGKEYK |
| | | E62A, C125A) | CKVSNKALPAPIEKTISKAKGQPREPQVYTLPPCRDELTKNQVSLWCLVKG |
| | | | FYPSDIAVEWESNGQPENNYKTTPPVLDSDGSFFLYSKLTVDKSRWQQGN |
| | | | VFSCSVMHEALHNHYTQKSLSLSPG |
| 486 | DNA158 | Hole: hFc(N297A) | DKTHTCPPCPAPELLGGPSVFLFPPKPKDTLMISRTPEVTCVVVDVSHEDP |
| | | | EVKFNWYVDGVEVHNAKTKPREEQYASTYRVVSVLTVLHQDWLNGKEYK |
| | | | CKVSNKALPAPIEKTISKAKGQPREPQVCTLPPSRDELTKNQVSLSCAVKGF |
| | | | YPSDIAVEWESNGQPENNYKTTPPVLDSDGSFFLVSKLTVDKSRWQQGN |
| | | | VFSCSVMHEALHNHYTQKSLSLSPG |
| 486 | DNA583 | Knob: hFc(N297A)-[VPLSLY]- | DKTHTCPPCPAPELLGGPSVFLFPPKPKDTLMISRTPEVTCVVVDVSHEDP |
| | | hIL2(H16E, R38A, F42A, Y45A, | EVKFNWYVDGVEVHNAKTKPREEQYASTYRVVSVLTVLHQDWLNGKEYK |
| | | E62A, C125A) | CKVSNKALPAPIEKTISKAKGQPREPQVYTLPPCRDELTKNQVSLWCLVKG |
| | | | FYPSDIAVEWESNGQPENNYKTTPPVLDSDGSFFLYSKLTVDKSRWQQGN |
| | | | VFSCSVMHEALHNHYTQKSLSLSPG |
| 487 | DNA158 | Hole: hFc(N297A) | DKTHTCPPCPAPELLGGPSVFLFPPKPKDTLMISRTPEVTCVVVDVSHEDP |
| | | | EVKFNWYVDGVEVHNAKTKPREEQYASTYRVVSVLTVLHQDWLNGKEYK |
| | | | CKVSNKALPAPIEKTISKAKGQPREPQVCTLPPSRDELTKNQVSLSCAVKGF |
| | | | YPSDIAVEWESNGQPENNYKTTPPVLDSDGSFFLVSKLTVDKSRWQQGN |
| | | | VFSCSVMHEALHNHYTQKSLSLSPG |
| 487 | DNA584 | Knob: hFc(N297A)-[VPLSLY]- | DKTHTCPPCPAPELLGGPSVFLFPPKPKDTLMISRTPEVTCVVVDVSHEDP |
| | | hIL2(D20L, R38A, F42A, Y45A, | EVKFNWYVDGVEVHNAKTKPREEQYASTYRVVSVLTVLHQDWLNGKEYK |
| | | E62A, C125A) | CKVSNKALPAPIEKTISKAKGQPREPQVYTLPPCRDELTKNQVSLWCLVKG |
| | | | FYPSDIAVEWESNGQPENNYKTTPPVLDSDGSFFLYSKLTVDKSRWQQGN |
| | | | VFSCSVMHEALHNHYTQKSLSLSPG |
| 488 | DNA158 | Hole: hFc(N297A) | DKTHTCPPCPAPELLGGPSVFLFPPKPKDTLMISRTPEVTCVVVDVSHEDP |
| | | | EVKFNWYVDGVEVHNAKTKPREEQYASTYRVVSVLTVLHQDWLNGKEYK |
| | | | CKVSNKALPAPIEKTISKAKGQPREPQVCTLPPSRDELTKNQVSLSCAVKGF |
| | | | YPSDIAVEWESNGQPENNYKTTPPVLDSDGSFFLVSKLTVDKSRWQQGN |
| | | | VFSCSVMHEALHNHYTQKSLSLSPG |
| 488 | DNA585 | Knob: hFc(N297A)-[VPLSLY]- | DKTHTCPPCPAPELLGGPSVFLFPPKPKDTLMISRTPEVTCVVVDVSHEDP |
| | | hIL2(H16Y, L18C, R38A, F42A, | EVKFNWYVDGVEVHNAKTKPREEQYASTYRVVSVLTVLHQDWLNGKEYK |
| | | Y45A, E62A) | CKVSNKALPAPIEKTISKAKGQPREPQVYTLPPCRDELTKNQVSLWCLVKG |
| | | | FYPSDIAVEWESNGQPENNYKTTPPVLDSDGSFFLYSKLTVDKSRWQQGN |
| | | | VFSCSVMHEALHNHYTQKSLSLSPG |
| 489 | DNA158 | Hole: hFc(N297A) | DKTHTCPPCPAPELLGGPSVFLFPPKPKDTLMISRTPEVTCVVVDVSHEDP |
| | | | EVKFNWYVDGVEVHNAKTKPREEQYASTYRVVSVLTVLHQDWLNGKEYK |
| | | | CKVSNKALPAPIEKTISKAKGQPREPQVCTLPPSRDELTKNQVSLSCAVKGF |
| | | | YPSDIAVEWESNGQPENNYKTTPPVLDSDGSFFLVSKLTVDKSRWQQGN |
| | | | VFSCSVMHEALHNHYTQKSLSLSPG |
| 489 | DNA586 | Knob: hFc(N297A)-[VPLSLY]- | DKTHTCPPCPAPELLGGPSVFLFPPKPKDTLMISRTPEVTCVVVDVSHEDP |
| | | hIL2(H16E, L18C, R38A, F42A, | EVKFNWYVDGVEVHNAKTKPREEQYASTYRVVSVLTVLHQDWLNGKEYK |
| | | Y45A, E62A) | CKVSNKALPAPIEKTISKAKGQPREPQVYTLPPCRDELTKNQVSLWCLVKG |
| | | | FYPSDIAVEWESNGQPENNYKTTPPVLDSDGSFFLYSKLTVDKSRWQQGN |
| | | | VFSCSVMHEALHNHYTQKSLSLSPG |
| 490 | DNA158 | Hole: hFc(N297A) | DKTHTCPPCPAPELLGGPSVFLFPPKPKDTLMISRTPEVTCVVVDVSHEDP |
| | | | EVKFNWYVDGVEVHNAKTKPREEQYASTYRVVSVLTVLHQDWLNGKEYK |
| | | | CKVSNKALPAPIEKTISKAKGQPREPQVCTLPPSRDELTKNQVSLSCAVKGF |
| | | | YPSDIAVEWESNGQPENNYKTTPPVLDSDGSFFLVSKLTVDKSRWQQGN |
| | | | VFSCSVMHEALHNHYTQKSLSLSPG |
| 490 | DNA587 | Knob: hFc(N297A)-[VPLSLY]- | DKTHTCPPCPAPELLGGPSVFLFPPKPKDTLMISRTPEVTCVVVDVSHEDP |
| | | hIL2(L18C, D20L, R38A, F42A, | EVKFNWYVDGVEVHNAKTKPREEQYASTYRVVSVLTVLHQDWLNGKEYK |
| | | Y45A, E62A) | CKVSNKALPAPIEKTISKAKGQPREPQVYTLPPCRDELTKNQVSLWCLVKG |
| | | | FYPSDIAVEWESNGQPENNYKTTPPVLDSDGSFFLYSKLTVDKSRWQQGN |
| | | | VFSCSVMHEALHNHYTQKSLSLSPG |
| 491 | DNA158 | Hole: hFc(N297A) | DKTHTCPPCPAPELLGGPSVFLFPPKPKDTLMISRTPEVTCVVVDVSHEDP |
| | | | EVKFNWYVDGVEVHNAKTKPREEQYASTYRVVSVLTVLHQDWLNGKEYK |
| | | | CKVSNKALPAPIEKTISKAKGQPREPQVCTLPPSRDELTKNQVSLSCAVKGF |
| | | | YPSDIAVEWESNGQPENNYKTTPPVLDSDGSFFLVSKLTVDKSRWQQGN |
| | | | VFSCSVMHEALHNHYTQKSLSLSPG |
| 491 | DNA588 | Knob: hFc(N297A)-[VPLSLY]- | DKTHTCPPCPAPELLGGPSVFLFPPKPKDTLMISRTPEVTCVVVDVSHEDP |
| | | hIL2(H16Y, L18C, D20L, R38A, | EVKFNWYVDGVEVHNAKTKPREEQYASTYRVVSVLTVLHQDWLNGKEYK |
| | | F42A, Y45A, E62A) | CKVSNKALPAPIEKTISKAKGQPREPQVYTLPPCRDELTKNQVSLWCLVKG |
| | | | FYPSDIAVEWESNGQPENNYKTTPPVLDSDGSFFLYSKLTVDKSRWQQGN |
| | | | VFSCSVMHEALHNHYTQKSLSLSPG |
| 492 | DNA158 | Hole: hFc(N297A) | DKTHTCPPCPAPELLGGPSVFLFPPKPKDTLMISRTPEVTCVVVDVSHEDP |
| | | | EVKFNWYVDGVEVHNAKTKPREEQYASTYRVVSVLTVLHQDWLNGKEYK |
| | | | CKVSNKALPAPIEKTISKAKGQPREPQVCTLPPSRDELTKNQVSLSCAVKGF |
| | | | YPSDIAVEWESNGQPENNYKTTPPVLDSDGSFFLVSKLTVDKSRWQQGN |
| | | | VFSCSVMHEALHNHYTQKSLSLSPG |
| 492 | DNA589 | Knob: hFc(N297A)-[VPLSLY]- | DKTHTCPPCPAPELLGGPSVFLFPPKPKDTLMISRTPEVTCVVVDVSHEDP |
| | | hIL2(H16E, L18C, D20L, R38A, | EVKFNWYVDGVEVHNAKTKPREEQYASTYRVVSVLTVLHQDWLNGKEYK |
| | | F42A, Y45A, E62A) | CKVSNKALPAPIEKTISKAKGQPREPQVYTLPPCRDELTKNQVSLWCLVKG |
| | | | FYPSDIAVEWESNGQPENNYKTTPPVLDSDGSFFLYSKLTVDKSRWQQGN |
| | | | VFSCSVMHEALHNHYTQKSLSLSPG |
| 493 | DNA187 | Hole: hFc(N297A)-hCD122 | DKTHTCPPCPAPELLGGPSVFLFPPKPKDTLMISRTPEVTCVVVDVSHEDP |
| | | | EVKFNWYVDGVEVHNAKTKPREEQYASTYRVVSVLTVLHQDWLNGKEYK |
| | | | CKVSNKALPAPIEKTISKAKGQPREPQVCTLPPSRDELTKNQVSLSCAVKGF |
| | | | YPSDIAVEWESNGQPENNYKTTPPVLDSDGSFFLVSKLTVDKSRWQQGN |
| | | | VFSCSVMHEALHNHYTQKSLSLSPG |
| 493 | DNA581 | Knob: hFc(N297A)-[VPLSLY]- | DKTHTCPPCPAPELLGGPSVFLFPPKPKDTLMISRTPEVTCVVVDVSHEDP |
| | | hIL2(L18C, R38A, F42A, Y45A, | EVKFNWYVDGVEVHNAKTKPREEQYASTYRVVSVLTVLHQDWLNGKEYK |
| | | E62A) | CKVSNKALPAPIEKTISKAKGQPREPQVYTLPPCRDELTKNQVSLWCLVKG |
| | | | FYPSDIAVEWESNGQPENNYKTTPPVLDSDGSFFLYSKLTVDKSRWQQGN |
| | | | VFSCSVMHEALHNHYTQKSLSLSPG |
| 494 | DNA187 | Hole: hFc(N297A)-hCD122 | DKTHTCPPCPAPELLGGPSVFLFPPKPKDTLMISRTPEVTCVVVDVSHEDP |
| | | | EVKFNWYVDGVEVHNAKTKPREEQYASTYRVVSVLTVLHQDWLNGKEYK |
| | | | CKVSNKALPAPIEKTISKAKGQPREPQVCTLPPSRDELTKNQVSLSCAVKGF |
| | | | YPSDIAVEWESNGQPENNYKTTPPVLDSDGSFFLVSKLTVDKSRWQQGN |
| | | | VFSCSVMHEALHNHYTQKSLSLSPG |
| 494 | DNA582 | Knob: hFc(N297A)-[VPLSLY]- | DKTHTCPPCPAPELLGGPSVFLFPPKPKDTLMISRTPEVTCVVVDVSHEDP |
| | | hIL2(H16Y, R38A, F42A, Y45A, | EVKFNWYVDGVEVHNAKTKPREEQYASTYRVVSVLTVLHQDWLNGKEYK |
| | | E62A, C125A) | CKVSNKALPAPIEKTISKAKGQPREPQVYTLPPCRDELTKNQVSLWCLVKG |
| | | | FYPSDIAVEWESNGQPENNYKTTPPVLDSDGSFFLYSKLTVDKSRWQQGN |
| | | | VFSCSVMHEALHNHYTQKSLSLSPG |
| 495 | DNA187 | Hole: hFc(N297A)-hCD122 | DKTHTCPPCPAPELLGGPSVFLFPPKPKDTLMISRTPEVTCVVVDVSHEDP |
| | | | EVKFNWYVDGVEVHNAKTKPREEQYASTYRVVSVLTVLHQDWLNGKEYK |
| | | | CKVSNKALPAPIEKTISKAKGQPREPQVCTLPPSRDELTKNQVSLSCAVKGF |
| | | | YPSDIAVEWESNGQPENNYKTTPPVLDSDGSFFLVSKLTVDKSRWQQGN |
| | | | VFSCSVMHEALHNHYTQKSLSLSPG |
| 495 | DNA583 | Knob: hFc(N297A)-[VPLSLY]- | DKTHTCPPCPAPELLGGPSVFLFPPKPKDTLMISRTPEVTCVVVDVSHEDP |
| | | hIL2(H16E, R38A, F42A, Y45A, | EVKFNWYVDGVEVHNAKTKPREEQYASTYRVVSVLTVLHQDWLNGKEYK |
| | | E62A, C125A) | CKVSNKALPAPIEKTISKAKGQPREPQVYTLPPCRDELTKNQVSLWCLVKG |
| | | | FYPSDIAVEWESNGQPENNYKTTPPVLDSDGSFFLYSKLTVDKSRWQQGN |
| | | | VFSCSVMHEALHNHYTQKSLSLSPG |
| 496 | DNA187 | Hole: hFc(N297A)-hCD122 | DKTHTCPPCPAPELLGGPSVFLFPPKPKDTLMISRTPEVTCVVVDVSHEDP |
| | | | EVKFNWYVDGVEVHNAKTKPREEQYASTYRVVSVLTVLHQDWLNGKEYK |
| | | | CKVSNKALPAPIEKTISKAKGQPREPQVCTLPPSRDELTKNQVSLSCAVKGF |
| | | | YPSDIAVEWESNGQPENNYKTTPPVLDSDGSFFLVSKLTVDKSRWQQGN |
| | | | VFSCSVMHEALHNHYTQKSLSLSPG |
| 496 | DNA584 | Knob: hFc(N297A)-[VPLSLY]- | DKTHTCPPCPAPELLGGPSVFLFPPKPKDTLMISRTPEVTCVVVDVSHEDP |
| | | hIL2(D20L, R38A, F42A, Y45A, | EVKFNWYVDGVEVHNAKTKPREEQYASTYRVVSVLTVLHQDWLNGKEYK |
| | | E62A, C125A) | CKVSNKALPAPIEKTISKAKGQPREPQVYTLPPCRDELTKNQVSLWCLVKG |
| | | | FYPSDIAVEWESNGQPENNYKTTPPVLDSDGSFFLYSKLTVDKSRWQQGN |
| | | | VFSCSVMHEALHNHYTQKSLSLSPG |
| 497 | DNA187 | Hole: hFc(N297A)-hCD122 | DKTHTCPPCPAPELLGGPSVFLFPPKPKDTLMISRTPEVTCVVVDVSHEDP |
| | | | EVKFNWYVDGVEVHNAKTKPREEQYASTYRVVSVLTVLHQDWLNGKEYK |
| | | | CKVSNKALPAPIEKTISKAKGQPREPQVCTLPPSRDELTKNQVSLSCAVKGF |
| | | | YPSDIAVEWESNGQPENNYKTTPPVLDSDGSFFLVSKLTVDKSRWQQGN |
| | | | VFSCSVMHEALHNHYTQKSLSLSPG |
| 497 | DNA585 | Knob: hFc(N297A)-[VPLSLY]- | DKTHTCPPCPAPELLGGPSVFLFPPKPKDTLMISRTPEVTCVVVDVSHEDP |
| | | hIL2(H16Y, L18C, R38A, F42A, | EVKFNWYVDGVEVHNAKTKPREEQYASTYRVVSVLTVLHQDWLNGKEYK |
| | | Y45A, E62A) | CKVSNKALPAPIEKTISKAKGQPREPQVYTLPPCRDELTKNQVSLWCLVKG |
| | | | FYPSDIAVEWESNGQPENNYKTTPPVLDSDGSFFLYSKLTVDKSRWQQGN |
| | | | VFSCSVMHEALHNHYTQKSLSLSPG |
| 498 | DNA187 | Hole: hFc(N297A)-hCD122 | DKTHTCPPCPAPELLGGPSVFLFPPKPKDTLMISRTPEVTCVVVDVSHEDP |
| | | | EVKFNWYVDGVEVHNAKTKPREEQYASTYRVVSVLTVLHQDWLNGKEYK |
| | | | CKVSNKALPAPIEKTISKAKGQPREPQVCTLPPSRDELTKNQVSLSCAVKGF |
| | | | YPSDIAVEWESNGQPENNYKTTPPVLDSDGSFFLVSKLTVDKSRWQQGN |
| | | | VFSCSVMHEALHNHYTQKSLSLSPG |
| 498 | DNA586 | Knob: hFc(N297A)-[VPLSLY]- | DKTHTCPPCPAPELLGGPSVFLFPPKPKDTLMISRTPEVTCVVVDVSHEDP |
| | | hIL2(H16E, L18C, R38A, F42A, | EVKFNWYVDGVEVHNAKTKPREEQYASTYRVVSVLTVLHQDWLNGKEYK |
| | | Y45A, E62A) | CKVSNKALPAPIEKTISKAKGQPREPQVYTLPPCRDELTKNQVSLWCLVKG |
| | | | FYPSDIAVEWESNGQPENNYKTTPPVLDSDGSFFLYSKLTVDKSRWQQGN |
| | | | VFSCSVMHEALHNHYTQKSLSLSPG |
| 499 | DNA187 | Hole: hFc(N297A)-hCD122 | DKTHTCPPCPAPELLGGPSVFLFPPKPKDTLMISRTPEVTCVVVDVSHEDP |
| | | | EVKFNWYVDGVEVHNAKTKPREEQYASTYRVVSVLTVLHQDWLNGKEYK |
| | | | CKVSNKALPAPIEKTISKAKGQPREPQVCTLPPSRDELTKNQVSLSCAVKGF |
| | | | YPSDIAVEWESNGQPENNYKTTPPVLDSDGSFFLVSKLTVDKSRWQQGN |
| | | | VFSCSVMHEALHNHYTQKSLSLSPG |
| 499 | DNA587 | Knob: hFc(N297A)-[VPLSLY]- | DKTHTCPPCPAPELLGGPSVFLFPPKPKDTLMISRTPEVTCVVVDVSHEDP |
| | | hIL2(L18C, D20L, R38A, F42A, | EVKFNWYVDGVEVHNAKTKPREEQYASTYRVVSVLTVLHQDWLNGKEYK |
| | | Y45A, E62A) | CKVSNKALPAPIEKTISKAKGQPREPQVYTLPPCRDELTKNQVSLWCLVKG |
| | | | FYPSDIAVEWESNGQPENNYKTTPPVLDSDGSFFLYSKLTVDKSRWQQGN |
| | | | VFSCSVMHEALHNHYTQKSLSLSPG |
| 500 | DNA187 | Hole: hFc(N297A)-hCD122 | DKTHTCPPCPAPELLGGPSVFLFPPKPKDTLMISRTPEVTCVVVDVSHEDP |
| | | | EVKFNWYVDGVEVHNAKTKPREEQYASTYRVVSVLTVLHQDWLNGKEYK |
| | | | CKVSNKALPAPIEKTISKAKGQPREPQVCTLPPSRDELTKNQVSLSCAVKGF |
| | | | YPSDIAVEWESNGQPENNYKTTPPVLDSDGSFFLVSKLTVDKSRWQQGN |
| | | | VFSCSVMHEALHNHYTQKSLSLSPG |
| 500 | DNA588 | Knob: hFc(N297A)-[VPLSLY]- | DKTHTCPPCPAPELLGGPSVFLFPPKPKDTLMISRTPEVTCVVVDVSHEDP |
| | | hIL2(H16Y, L18C, D20L, R38A, | EVKFNWYVDGVEVHNAKTKPREEQYASTYRVVSVLTVLHQDWLNGKEYK |
| | | F42A, Y45A, E62A) | CKVSNKALPAPIEKTISKAKGQPREPQVYTLPPCRDELTKNQVSLWCLVKG |
| | | | FYPSDIAVEWESNGQPENNYKTTPPVLDSDGSFFLYSKLTVDKSRWQQGN |
| | | | VFSCSVMHEALHNHYTQKSLSLSPG |
| 501 | DNA187 | Hole: hFc(N297A)-hCD122 | DKTHTCPPCPAPELLGGPSVFLFPPKPKDTLMISRTPEVTCVVVDVSHEDP |
| | | | EVKFNWYVDGVEVHNAKTKPREEQYASTYRVVSVLTVLHQDWLNGKEYK |
| | | | CKVSNKALPAPIEKTISKAKGQPREPQVCTLPPSRDELTKNQVSLSCAVKGF |
| | | | YPSDIAVEWESNGQPENNYKTTPPVLDSDGSFFLVSKLTVDKSRWQQGN |
| | | | VFSCSVMHEALHNHYTQKSLSLSPG |
| 501 | DNA589 | Knob: hFc(N297A)-[VPLSLY]- | DKTHTCPPCPAPELLGGPSVFLFPPKPKDTLMISRTPEVTCVVVDVSHEDP |
| | | hIL2(H16E, L18C, D20L, R38A, | EVKFNWYVDGVEVHNAKTKPREEQYASTYRVVSVLTVLHQDWLNGKEYK |
| | | F42A, Y45A, E62A) | CKVSNKALPAPIEKTISKAKGQPREPQVYTLPPCRDELTKNQVSLWCLVKG |
| | | | FYPSDIAVEWESNGQPENNYKTTPPVLDSDGSFFLYSKLTVDKSRWQQGN |
| | | | VFSCSVMHEALHNHYTQKSLSLSPG |
| 502 | DNA543 | Hole: hFc(N297A)-[VPLSLY]- | DKTHTCPPCPAPELLGGPSVFLFPPKPKDTLMISRTPEVTCVVVDVSHEDP |
| | | hCD122 | EVKFNWYVDGVEVHNAKTKPREEQYASTYRVVSVLTVLHQDWLNGKEYK |
| | | | CKVSNKALPAPIEKTISKAKGQPREPQVCTLPPSRDELTKNQVSLSCAVKGF |
| | | | YPSDIAVEWESNGQPENNYKTTPPVLDSDGSFFLVSKLTVDKSRWQQGN |
| | | | VFSCSVMHEALHNHYTQKSLSLSPG |
| 502 | DNA577 | Knob: hFc(N297, I253A)- | DKTHTCPPCPAPELLGGPSVFLFPPKPKDTLMASRTPEVTCVVVDVSHEDP |
| | | hIL2(R38A, F42A, Y45A, E62A, | EVKFNWYVDGVEVHNAKTKPREEQYASTYRVVSVLTVLHQDWLNGKEYK |
| | | C125A) | CKVSNKALPAPIEKTISKAKGQPREPQVYTLPPCRDELTKNQVSLWCLVKG |
| | | | FYPSDIAVEWESNGQPENNYKTTPPVLDSDGSFFLYSKLTVDKSRWQQGN |
| | | | VFSCSVMHEALHNHYTQKSLSLSPG |
| 503 | DNA255 | Knob: hFc(N297A)-hIL2(R38A, | DKTHTCPPCPAPELLGGPSVFLFPPKPKDTLMISRTPEVTCVVVDVSHEDP |
| | | F42A, Y45A, E62A, C125A) | EVKFNWYVDGVEVHNAKTKPREEQYASTYRVVSVLTVLHQDWLNGKEYK |
| | | | CKVSNKALPAPIEKTISKAKGQPREPQVYTLPPCRDELTKNQVSLWCLVKG |
| | | | FYPSDIAVEWESNGQPENNYKTTPPVLDSDGSFFLYSKLTVDKSRWQQGN |
| | | | VFSCSVMHEALHNHYTQKSLSLSPG |
| 503 | DNA606 | Hole: hFc(N297A)-[RAAAVKSP]- | DKTHTCPPCPAPELLGGPSVFLFPPKPKDTLMISRTPEVTCVVVDVSHEDP |
| | | hCD122 | EVKFNWYVDGVEVHNAKTKPREEQYASTYRVVSVLTVLHQDWLNGKEYK |
| | | | CKVSNKALPAPIEKTISKAKGQPREPQVCTLPPSRDELTKNQVSLSCAVKGF |
| | | | YPSDIAVEWESNGQPENNYKTTPPVLDSDGSFFLVSKLTVDKSRWQQGN |
| | | | VFSCSVMHEALHNHYTQKSLSLSPG |
| 504 | DNA603 | Hole: hFcIgG4-hCD122 | ESKYGPPCPPCPAPEFLGGPSVFLFPPKPKDTLMISRTPEVTCVVVDVSQED |
| | | | PEVQFNWYVDGVEVHNAKTKPREEQFNSTYRVVSVLTVLHQDWLNGKE |
| | | | YKCKVSNKGLPSSIEKTISKAKGQPREPQVCTLPPSQEEMTKNQVSLSCAVK |
| | | | GFYPSDIAVEWESNGQPENNYKTTPPVLDSDGSFFLYSRLTVDKSRWQEG |
| | | | NVFSCSVMHEALHNHYTQKSLSLSLG |
| 504 | DNA605 | Knob: hFcIgG4-hIL2-[VPLSLY]- | ESKYGPPCPPCPAPEFLGGPSVFLFPPKPKDTLMISRTPEVTCVVVDVSQED |
| | | hIL2(R38A, F42A, Y45A, E62A, | PEVQFNWYVDGVEVHNAKTKPREEQFNSTYRVVSVLTVLHQDWLNGKE |
| | | C125A) | YKCKVSNKGLPSSIEKTISKAKGQPREPQVYTLPPCQEEMTKNQVSLWCLV |
| | | | KGFYPSDIAVEWESNGQPENNYKTTPPVLDSDGSFFLYSRLTVDKSRWQE |
| | | | GNVFSCSVMHEALHNHYTQKSLSLSLG |
| 505 | DNA603 | Hole: hFcIgG4-hCD122 | ESKYGPPCPPCPAPEFLGGPSVFLFPPKPKDTLMISRTPEVTCVVVDVSQED |
| | | | PEVQFNWYVDGVEVHNAKTKPREEQFNSTYRVVSVLTVLHQDWLNGKE |
| | | | YKCKVSNKGLPSSIEKTISKAKGQPREPQVCTLPPSQEEMTKNQVSLSCAVK |
| | | | GFYPSDIAVEWESNGQPENNYKTTPPVLDSDGSFFLYSRLTVDKSRWQEG |
| | | | NVFSCSVMHEALHNHYTQKSLSLSLG |
| 505 | DNA604 | Knob: IgG4 hFc-hIL2(R38A, F42A, | ESKYGPPCPPCPAPEFLGGPSVFLFPPKPKDTLMISRTPEVTCVVVDVSQED |
| | | Y45A, E62A, C125A) | PEVQFNWYVDGVEVHNAKTKPREEQFNSTYRVVSVLTVLHQDWLNGKE |
| | | | YKCKVSNKGLPSSIEKTISKAKGQPREPQVYTLPPCQEEMTKNQVSLWCLV |
| | | | KGFYPSDIAVEWESNGQPENNYKTTPPVLDSDGSFFLYSRLTVDKSRWQE |
| | | | GNVFSCSVMHEALHNHYTQKSLSLSLG |
| 508 | DNA577 | Knob: hFc(N297, I253A)- | DKTHTCPPCPAPELLGGPSVFLFPPKPKDTLMASRTPEVTCVVVDVSHEDP |
| | | hIL2(R38A, F42A, Y45A, E62A, | EVKFNWYVDGVEVHNAKTKPREEQYASTYRVVSVLTVLHQDWLNGKEYK |
| | | C125A) | CKVSNKALPAPIEKTISKAKGQPREPQVYTLPPCRDELTKNQVSLWCLVKG |
| | | | FYPSDIAVEWESNGQPENNYKTTPPVLDSDGSFFLYSKLTVDKSRWQQGN |
| | | | VFSCSVMHEALHNHYTQKSLSLSPG |
| 508 | DNA609 | Hole: hFc(N297A, I253A)- | DKTHTCPPCPAPELLGGPSVFLFPPKPKDTLMASRTPEVTCVVVDVSHEDP |
| | | [VPLSLY]-hCD122 | EVKFNWYVDGVEVHNAKTKPREEQYASTYRVVSVLTVLHQDWLNGKEYK |
| | | | CKVSNKALPAPIEKTISKAKGQPREPQVCTLPPSRDELTKNQVSLSCAVKGF |
| | | | YPSDIAVEWESNGQPENNYKTTPPVLDSDGSFFLVSKLTVDKSRWQQGN |
| | | | VFSCSVMHEALHNHYTQKSLSLSPG |
| 509 | DNA575 | Hole: hFc(N297A, I253A)- | DKTHTCPPCPAPELLGGPSVFLFPPKPKDTLMASRTPEVTCVVVDVSHEDP |
| | | hCD122 | EVKFNWYVDGVEVHNAKTKPREEQYASTYRVVSVLTVLHQDWLNGKEYK |
| | | | CKVSNKALPAPIEKTISKAKGQPREPQVCTLPPSRDELTKNQVSLSCAVKGF |
| | | | YPSDIAVEWESNGQPENNYKTTPPVLDSDGSFFLVSKLTVDKSRWQQGN |
| | | | VFSCSVMHEALHNHYTQKSLSLSPG |
| 509 | DNA623 | Knob: hFc(N297, I253A)- | DKTHTCPPCPAPELLGGPSVFLFPPKPKDTLMASRTPEVTCVVVDVSHEDP |
| | | [MPYDLYHP]-hIL2(R38A, F42A, | EVKFNWYVDGVEVHNAKTKPREEQYASTYRVVSVLTVLHQDWLNGKEYK |
| | | Y45A, E62A, C125A) | CKVSNKALPAPIEKTISKAKGQPREPQVYTLPPCRDELTKNQVSLWCLVKG |
| | | | FYPSDIAVEWESNGQPENNYKTTPPVLDSDGSFFLYSKLTVDKSRWQQGN |
| | | | VFSCSVMHEALHNHYTQKSLSLSPG |
| 510 | DNA577 | Knob: hFc(N297, I253A)- | DKTHTCPPCPAPELLGGPSVFLFPPKPKDTLMASRTPEVTCVVVDVSHEDP |
| | | hIL2(R38A, F42A, Y45A, E62A, | EVKFNWYVDGVEVHNAKTKPREEQYASTYRVVSVLTVLHQDWLNGKEYK |
| | | C125A) | CKVSNKALPAPIEKTISKAKGQPREPQVYTLPPCRDELTKNQVSLWCLVKG |
| | | | FYPSDIAVEWESNGQPENNYKTTPPVLDSDGSFFLYSKLTVDKSRWQQGN |
| | | | VFSCSVMHEALHNHYTQKSLSLSPG |
| 510 | DNA608 | Hole: hFc(N297A, I253A)- | DKTHTCPPCPAPELLGGPSVFLFPPKPKDTLMASRTPEVTCVVVDVSHEDP |
| | | [MPYDLYHP]-hCD122 | EVKFNWYVDGVEVHNAKTKPREEQYASTYRVVSVLTVLHQDWLNGKEYK |
| | | | CKVSNKALPAPIEKTISKAKGQPREPQVCTLPPSRDELTKNQVSLSCAVKGF |
| | | | YPSDIAVEWESNGQPENNYKTTPPVLDSDGSFFLVSKLTVDKSRWQQGN |
| | | | VFSCSVMHEALHNHYTQKSLSLSPG |
| 511 | DNA604 | Knob: IgG4 hFc-hIL2(R38A, F42A, | ESKYGPPCPPCPAPEFLGGPSVFLFPPKPKDTLMISRTPEVTCVVVDVSQED |
| | | Y45A, E62A, C125A) | PEVQFNWYVDGVEVHNAKTKPREEQFNSTYRVVSVLTVLHQDWLNGKE |
| | | | YKCKVSNKGLPSSIEKTISKAKGQPREPQVYTLPPCQEEMTKNQVSLWCLV |
| | | | KGFYPSDIAVEWESNGQPENNYKTTPPVLDSDGSFFLYSRLTVDKSRWQE |
| | | | GNVFSCSVMHEALHNHYTQKSLSLSLG |
| 511 | DNA621 | Hole: hFcIgG4-[VPLSLY]-hCD122 | ESKYGPPCPPCPAPEFLGGPSVFLFPPKPKDTLMISRTPEVTCVVVDVSQED |
| | | Knob: hFc(N297, I253A)- | PEVQFNWYVDGVEVHNAKTKPREEQFNSTYRVVSVLTVLHQDWLNGKE |
| | | | YKCKVSNKGLPSSIEKTISKAKGQPREPQVCTLPPSQEEMTKNQVSLSCAVK |
| | | | GFYPSDIAVEWESNGQPENNYKTTPPVLDSDGSFFLYSRLTVDKSRWQEG |
| | | | NVFSCSVMHEALHNHYTQKSLSLSLGGP |
| 512 | DNA577 | hIL2(R38A, F42A, Y45A, E62A, | DKTHTCPPCPAPELLGGPSVFLFPPKPKDTLMASRTPEVTCVVVDVSHEDP |
| | | C125A) | EVKFNWYVDGVEVHNAKTKPREEQYASTYRVVSVLTVLHQDWLNGKEYK |
| | | | CKVSNKALPAPIEKTISKAKGQPREPQVYTLPPCRDELTKNQVSLWCLVKG |
| | | | FYPSDIAVEWESNGQPENNYKTTPPVLDSDGSFFLYSKLTVDKSRWQQGN |
| | | | VFSCSVMHEALHNHYTQKSLSLSPG |
| 512 | DNA625 | Hole: hFc(N297A, I253A) | DKTHTCPPCPAPELLGGPSVFLFPPKPKDTLMASRTPEVTCVVVDVSHEDP |
| | | | EVKFNWYVDGVEVHNAKTKPREEQYASTYRVVSVLTVLHQDWLNGKEYK |
| | | | CKVSNKALPAPIEKTISKAKGQPREPQVCTLPPSRDELTKNQVSLSCAVKGF |
| | | | YPSDIAVEWESNGQPENNYKTTPPVLDSDGSFFLVSKLTVDKSRWQQGN |
| | | | VFSCSVMHEALHNHYTQKSLSLSPG |
| 513 | DNA604 | Knob: IgG4 hFc-hIL2(R38A, F42A, | ESKYGPPCPPCPAPEFLGGPSVFLFPPKPKDTLMISRTPEVTCVVVDVSQED |
| | | Y45A, E62A, C125A) | PEVQFNWYVDGVEVHNAKTKPREEQFNSTYRVVSVLTVLHQDWLNGKE |
| | | | YKCKVSNKGLPSSIEKTISKAKGQPREPQVYTLPPCQEEMTKNQVSLWCLV |
| | | | KGFYPSDIAVEWESNGQPENNYKTTPPVLDSDGSFFLYSRLTVDKSRWQE |
| | | | GNVFSCSVMHEALHNHYTQKSLSLSLG |
| 513 | DNA626 | Hole: hFcIgG4 | ESKYGPPCPPCPAPEFLGGPSVFLFPPKPKDTLMISRTPEVTCVVVDVSQED |
| | | | PEVQFNWYVDGVEVHNAKTKPREEQFNSTYRVVSVLTVLHQDWLNGKE |
| | | | YKCKVSNKGLPSSIEKTISKAKGQPREPQVCTLPPSQEEMTKNQVSLSCAVK |
| | | | GFYPSDIAVEWESNGQPENNYKTTPPVLDSDGSFFLYSRLTVDKSRWQEG |
| | | | NVFSCSVMHEALHNHYTQKSLSLSLGPG |
| 526 | DNA670 | Knob: hFc-hIL2(R38A, F42A, | DKTHTCPPCPAPELLGGPSVFLFPPKPKDTLMISRTPEVTCVVVDVSHEDP |
| | | Y45A, E62A, C125A) | EVKFNWYVDGVEVHNAKTKPREEQYNSTYRVVSVLTVLHQDWLNGKEY |
| | | | KCKVSNKALPAPIEKTISKAKGQPREPQVYTLPPCRDELTKNQVSLWCLVK |
| | | | GFYPSDIAVEWESNGQPENNYKTTPPVLDSDGSFFLYSKLTVDKSRWQQG |
| | | | NVFSCSVMHEALHNHYTQKSLSLSPG |
| 526 | DNA672 | Hole: hFc-[VPLSLY]-hCD122 | DKTHTCPPCPAPELLGGPSVFLFPPKPKDTLMISRTPEVTCVVVDVSHEDP |
| | | | EVKFNWYVDGVEVHNAKTKPREEQYNSTYRVVSVLTVLHQDWLNGKEY |
| | | | KCKVSNKALPAPIEKTISKAKGQPREPQVCTLPPSRDELTKNQVSLSCAVKG |
| | | | FYPSDIAVEWESNGQPENNYKTTPPVLDSDGSFFLVSKLTVDKSRWQQG |
| | | | NVFSCSVMHEALHNHYTQKSLSLSPG |
| 530 | DNA255 | Knob: hFc(N297A)-hIL2(R38A, | DKTHTCPPCPAPELLGGPSVFLFPPKPKDTLMISRTPEVTCVVVDVSHEDP |
| | | F42A, Y45A, E62A, C125A) | EVKFNWYVDGVEVHNAKTKPREEQYASTYRVVSVLTVLHQDWLNGKEYK |
| | | | CKVSNKALPAPIEKTISKAKGQPREPQVYTLPPCRDELTKNQVSLWCLVKG |
| | | | FYPSDIAVEWESNGQPENNYKTTPPVLDSDGSFFLYSKLTVDKSRWQQGN |
| | | | VFSCSVMHEALHNHYTQKSLSLSPG |
| 530 | DNA612 | Hole: hFc(N297A)-[MPYDLYHP]- | DKTHTCPPCPAPELLGGPSVFLFPPKPKDTLMISRTPEVTCVVVDVSHEDP |
| | | hCD122(C122S, C168S) | EVKFNWYVDGVEVHNAKTKPREEQYASTYRVVSVLTVLHQDWLNGKEYK |
| | | | CKVSNKALPAPIEKTISKAKGQPREPQVCTLPPSRDELTKNQVSLSCAVKGF |
| | | | YPSDIAVEWESNGQPENNYKTTPPVLDSDGSFFLVSKLTVDKSRWQQGN |
| | | | VFSCSVMHEALHNHYTQKSLSLSPG |
| 531 | DNA255 | Knob: hFc(N297A)-hIL2(R38A, | DKTHTCPPCPAPELLGGPSVFLFPPKPKDTLMISRTPEVTCVVVDVSHEDP |
| | | F42A, Y45A, E62A, C125A) | EVKFNWYVDGVEVHNAKTKPREEQYASTYRVVSVLTVLHQDWLNGKEYK |
| | | | CKVSNKALPAPIEKTISKAKGQPREPQVYTLPPCRDELTKNQVSLWCLVKG |
| | | | FYPSDIAVEWESNGQPENNYKTTPPVLDSDGSFFLYSKLTVDKSRWQQGN |
| | | | VFSCSVMHEALHNHYTQKSLSLSPG |
| 531 | DNA614 | Hole: hFc(N297A)-[DSGGFMLT]- | DKTHTCPPCPAPELLGGPSVFLFPPKPKDTLMISRTPEVTCVVVDVSHEDP |
| | | hCD122(C122S, C168S) | EVKFNWYVDGVEVHNAKTKPREEQYASTYRVVSVLTVLHQDWLNGKEYK |
| | | | CKVSNKALPAPIEKTISKAKGQPREPQVCTLPPSRDELTKNQVSLSCAVKGF |
| | | | YPSDIAVEWESNGQPENNYKTTPPVLDSDGSFFLVSKLTVDKSRWQQGN |
| | | | VFSCSVMHEALHNHYTQKSLSLSPG |
| 532 | DNA669 | Hole: hFc-hCD122 | DKTHTCPPCPAPELLGGPSVFLFPPKPKDTLMISRTPEVTCVVVDVSHEDP |
| | | | EVKFNWYVDGVEVHNAKTKPREEQYNSTYRVVSVLTVLHQDWLNGKEY |
| | | | KCKVSNKALPAPIEKTISKAKGQPREPQVCTLPPSRDELTKNQVSLSCAVKG |
| | | | FYPSDIAVEWESNGQPENNYKTTPPVLDSDGSFFLVSKLTVDKSRWQQG |
| | | | NVFSCSVMHEALHNHYTQKSLSLSPG |
| 532 | DNA671 | Knob: hFc-[VPLSLY]-hIL2(R38A, | DKTHTCPPCPAPELLGGPSVFLFPPKPKDTLMISRTPEVTCVVVDVSHEDP |
| | | F42A, Y45A, E62A, C125A) | EVKFNWYVDGVEVHNAKTKPREEQYNSTYRVVSVLTVLHQDWLNGKEY |
| | | | KCKVSNKALPAPIEKTISKAKGQPREPQVYTLPPCRDELTKNQVSLWCLVK |
| | | | GFYPSDIAVEWESNGQPENNYKTTPPVLDSDGSFFLYSKLTVDKSRWQQG |
| | | | NVFSCSVMHEALHNHYTQKSLSLSPG |
| | [symbol] olecule | Component2Sequence | Component3Sequence |
| | 368 | PGSGS | AVNGTSQFTCFYNSRANISCVWSQDGALQDTSCQVHAWPDRRR |
| | | | WNQTCELLPVSQASWACNLILGAPDSQKLTTVDIVTLRVLCREGVR |
| | | | WRVMAIQDFKPFENLRLMAPISLQVVHVETHRCNISWEISQASHY [symbol] |
| | | | ERHLEFEARTLSPGHTWEEAPLLTLKQKQEWICLETLTPDTQYEFQV |
| | | | RVKPLQGEFTTWSPWSQPLAFRTKPAALGKD |
| | 368 | G | NPMGSDPVNFKLLRVVNG |
| | 375 | GGSSPPGGGSSGGGSGP | APTSSSTKKTQLQLEHLLLDLQMILNGINNYKNPKLTAMLTAKFAMF |
| | | | KKATELKHLQCLEEALKPLEEVLNLAQSKNFHLRPRDLISNINVIVLEL |
| | | | KGSETTFMCEYADETATIVEFLNRWITFAQSIISTLT |
| | 375 | | |
| | 376 | GSPG | VPLSLY |
| | 376 | | |
| | 377 | GGSSPPGGGSSGGGSGP | APTSSSTKKTQLQEHLLLDLQMILNGINNYKNPKLTAMLTAKFAM [symbol] |
| | | | KKATELKHLQCLEEALKPLEEVLNLAQSKNFHLRPRDLISNINVIVLEL |
| | | | KGSETTFMCEYADETATIVEFLNRWITFAQSIISTLT |
| | 377 | PGSGS | AVNGTSQFTCFYNSRANISCVWSQDGALQDTSCQVHAWPDRRR |
| | | | WNQTCELLPVSQASWACNLILGAPDSQKLTTVDIVTLRVLCREGVR |
| | | | WRVMAIQDFKPFENLRLMAPISLQVVHVETHRCNISWEISQASHY [symbol] |
| | | | ERHLEFEARTLSPGHTWEEAPLLTLKQKQEWICLETLTPDTQYEFQV |
| | | | RVKPLQGEFTTWSPWSQPLAFRTKPAALGKD |
| | 378 | GSGP | VPLSLY |
| | 378 | PGSGS | AVNGTSQFTCFYNSRANISCVWSQDGALQDTSCQVHAWPDRRR |
| | | | WNQTCELLPVSQASWACNLILGAPDSQKLTTVDIVTLRVLCREGVR |
| | | | WRVMAIQDFKPFENLRLMAPISLQVVHVETHRCNISWEISQASHY [symbol] |
| | | | ERHLEFEARTLSPGHTWEEAPLLTLKQKQEWICLETLTPDTQYEFQV |
| | | | RVKPLQGEFTTWSPWSQPLAFRTKPAALGKD |
| | 397 | | |
| | 397 | GSGP | DSGGFMLT |
| | 429 | GGSSPPGGGSSGGGSGP | APTSSSTKKTQLQLEHLLLDLQMILNGINNYKNPKLTAMLTAKFAM [symbol] |
| | | | KKATELKHLQCLEEALKPLEEVLNLAQSKNFHLRPRDLISNINVIVLEL |
| | | | KGSETTFMCEYADETATIVEFLNRWITFAQSIISTLT |
| | 429 | HHHHHHHH | |
| | 430 | GGSSPPGGGSSGGGSGP | APTSSSTKKTQLQLEHLLLDLQMILNGINNYKNPKLTAMLTAKFAM [symbol] |
| | | | KKATELKHLQCLEEALKPLEEVLNLAQSKNFHLRPRDLISNINVIVLEL |
| | | | KGSETTFMCEYADETATIVEFLNRWITFAQSIISTLT |
| | 430 | PGSGS | AVNGTSQFTCFYNSRANISCVWSQDGALQDTSCQVHAWPDRRR |
| | | | WNQTCELLPVSQASWACNLILGAPDSQKLTTVDIVTLRVLCREGVR |
| | | | WRVMAIQDFKPFENLRLMAPISLQVVHVETHRCNISWEISQASHY [symbol] |
| | | | ERHLEFEARTLSPGHTWEEAPLLTLKQKQEWICLETLTPDTQYEFQV |
| | | | RVKPLQGEFTTWSPWSQPLAFRTKPAALGKD |
| | 431 | GGSSPPGGGSSGGGSGP | APTSSSTKKTQLQLEHLLLDLQMILNGINNYKNPKLTAMLTAKFAM [symbol] |
| | | | KKATELKHLQCLEEALKPLEEVLNLAQSKNFHLRPRDLISNINVIVLEL |
| | | | KGSETTFMCEYADETATIVEFLNRWITFAQSIISTLT |
| | 431 | PGSGS | AVKNCSHLECFYNSRANVSCMWSHEEALNVTTCHVHAKSNLRHW |
| | | | NKTCELTLVRQASWACNLILGSFPESQSLTSVDLLDINVVCWEEKG |
| | | | WRRVKTCDFHPFDNLRLVAPHSLQVLHIDTQRCNISWKVSQVSHY [symbol] |
| | | | EPYLEFEARRRLLGHSWEDASVLSLKQRQQWLFLEMLIPSTSYEVQ [symbol] |
| | | | RVKAQRNNTGTWSPWSQPLTFRTRPADPMKE |
| | 432 | GSPG | VPLSLY |
| | 432 | PGSGS | AVNGTSQFTCFYNSRANISCVWSQDGALQDTSCQVHAWPDRRR |
| | | | WNQTCELLPVSQASWACNLILGAPDSQKLTTVDIVTLRVLCREGVR |
| | | | WRVMAIQDFKPFENLRLMAPISLQVVHVETHRCNISWEISQASHY [symbol] |
| | | | ERHLEFEARTLSPGHTWEEAPLLTLKQKQEWICLETLTPDTQYEFQV |
| | | | RVKPLQGEFTTWSPWSQPLAFRTKPAALGKD |
| | 433 | GSPG | VPLSLY |
| | 433 | PGSGS | AVKNCSHLECFYNSRANVSCMWSHEEALNVTTCHVHAKSNLRHW |
| | | | NKTCELTLVRQASWACNLILGSFPESQSLTSVDLLDINVVCWEEKG |
| | | | WRRVKTCDFHPFDNLRLVAPHSLQVLHIDTQRCNISWKVSQVSHYI [symbol] |
| | | | EPYLEFEARRRLLGHSWEDASVLSLKQRQQWLFLEMLIPSTSYEVQ [symbol] |
| | | | RVKAQRNNTGTWSPWSQPLTFRTRPADPMKE |
| | 435 | GSPG | VPLSLY |
| | 435 | GGS | DKTHTCPPCPAPELLGGPSVFLFPPKPKDTLMISRTPEVTCVVVDVS [symbol] |
| | | | EDPEVKFNWYVDGVEVHNAKTKPREEQYASTYRVVSVLTVLHQDW |
| | | | LNGKEYKCKVSNKALPAPIEKTISKAKGQPREPQVCTLPPSRDELTKN |
| | | | QVSLSCAVKGFYPSDIAVEWESNGQPENNYKTTPPVLDSDGSFFLV [symbol] |
| | | | KLTVDKSRWQQGNVFSCSVMHEALHNHYTQKSLSLSPG |
| | 436 | PGSGS | AVNGTSQFTCFYNSRANISCVWSQDGALQDTSCQVHAWPDRRR |
| | | | WNQTCELLPVSQASWACNLILGAPDSQKLTTVDIVTLRVLCREGVR |
| | | | WRVMAIQDFKPFENLRLMAPISLQVVHVETHRCNISWEISQASHY [symbol] |
| | | | ERHLEFEARTLSPGHTWEEAPLLTLKQKQEWICLETLTPDTQYEFQV |
| | | | RVKPLQGEFTTWSPWSQPLAFRTKPAALGKD |
| | 436 | GISSGLLSGRSDQPSGP | APTSSSTKKTQLQLEHLLLDLQMILNGINNYKNPKLTAMLTAKFAMF |
| | | | KKATELKHLQCLEEALKPLEEVLNLAQSKNFHLRPRDLISNINVIVLEL |
| | | | KGSETTFMCEYADETATIVEFLNRWITFAQSIISTLT |
| | 437 | PGSGS | AVNGTSQFTCFYNSRANISCVWSQDGALQDTSCQVHAWPDRRR |
| | | | WNQTCELLPVSQASWACNLILGAPDSQKLTTVDIVTLRVLCREGVR |
| | | | WRVMAIQDFKPFENLRLMAPISLQVVHVETHRCNISWEISQASHY [symbol] |
| | | | ERHLEFEARTLSPGHTWEEAPLLTLKQKQEWICLETLTPDTQYEFQV |
| | | | RVKPLQGEFTTWSPWSQPLAFRTKPAALGKD |
| | 437 | GISSGLLSGRSSGP | APTSSSTKKTQLQLEHLLLDLQMILN [symbol] INNYKNPKLTAMLTAKFAM [symbol] |
| | | | KKATELKHLQCLEEALKPLEEVLNLAQSKNFHLRPRDLISNINVIVLEL |
| | | | KGSETTFMCEYADETATIVEFLNRWITFAQSIISTLT |
| | 438 | GGSSPPGGGSSGGGSGP | APTSSSTKKTQLQLEHLLLDLQMILNGINNYKNPKLTAMLTAKFAM [symbol] |
| | | | KKATELKHLQCLEEALKPLEEVLNLAQSKNFHLRPRDLISNINVIVLEL |
| | | | KGSETTFMCEYADETATIVEFLNRWITFAQSIISTLT |
| | 438 | GPPSGSSPG | VPLSLY |
| | 439 | | |
| | 439 | GSPG | VPLSLY |
| | 440 | PGSGS | AVNGTSQFTCFYNSRANISCVWSQDGALQDTSCQVHAWPDRRR |
| | | | WNQTCELLPVSQASWACNLILGAPDSQKLTTVDIVTLRVLCREGVR |
| | | | WRVMAIQDFKPFENLRLMAPISLQVVHVETHRCNISWEISQASHY [symbol] |
| | | | ERHLEFEARTLSPGHTWEEAPLLTLKQKQEWICLETLTPDTQYEFQV |
| | | | RVKPLQGEFTTWSPWSQPLAFRTKPAALGKD |
| | 440 | GSPG | VPLSLY |
| | 441 | GPPSGSSPG | VPLSLY |
| | 441 | GGSSPPGGGSSGGGSGP | APTSSSTKKTQLQLEHLLLDLQMILNGINNYKNPKLTAMLTAKFAM [symbol] |
| | | | KKATELKHLQCLEEALKPLEEVLNLAQSKNFHFDPRDVVSNINVFVL [symbol] |
| | | | LKGSETTFMCEYADETATIVEFLNRWITFAQSIISTLT |
| | 442 | GGSSPPGGGSSGGGSGP | APTSSSTKKTQLQLEHLLLDLQMILNGINNYKNPKLTAMLTAKFAM [symbol] |
| | | | KKATELKHLQCLEEALKPLEEVLNLAQSKNFHLRPRDLISNINVIVLEL |
| | | | KGSETTFMCEYADETATIVEFLNRWITFAQSIISTLT |
| | 442 | GPPSGSSPG | DSGGFMLT |
| | 443 | PGSGS | AVNGTSQFTCFYNSRANISCVWSQDGALQDTSCQVHAWPDRRR |
| | | | WNQTCELLPVSQASWACNLILGAPDSQKLTTVDIVTLRVLCREGVR |
| | | | WRVMAIQDFKPFENLRLMAPISLQVVHVETHRCNISWEISQASHY [symbol] |
| | | | ERHLEFEARTLSPGHTWEEAPLLTLKQKQEWICLETLTPDTQYEFQV |
| | | | RVKPLQGEFTTWSPWSQPLAFRTKPAALGKD |
| | 443 | GSPG | VPLSLY |
| | 444 | GSGP | DSGGFMLT |
| | 444 | PGSGS | AVNGTSQFTCFYNSRANISCVWSQDGALQDTSCQVHAWPDRRR |
| | | | WNQTCELLPVSQASWACNLILGAPDSQKLTTVDIVTLRVLCREGVR |
| | | | WRVMAIQDFKPFENLRLMAPISLQVVHVETHRSNISWEISQASHY [symbol] |
| | | | ERHLEFEARTLSPGHTWEEAPLLTLKQKQEWISLETLTPDTQYEFQV |
| | | | RVKPLQGEFTTWSPWSQPLAFRTKPAALGKD |
| | 449 | PGSGS | AVNGTSQFTCFYNSRANISCVWSQDGALQDTSCQVHAWPDRRR |
| | | | WNQTCELLPVSQASWACNLILGAPDSQKLTTVDIVTLRVLCREGVR |
| | | | WRVMAIQDFKPFENLRLMAPISLQVVHVETHRCNISWEISQASHY [symbol] |
| | | | ERHLEFEARTLSPGHTWEEAPLLTLKQKQEWICLETLTPDTQYEFQV |
| | | | RVKPLQGEFTTWSPWSQPLAFRTKPAALGKD |
| | 449 | GSPG | VPLSLY |
| | 450 | PGSGS | AVNGTSQFTCFYNSRANISCVWSQDGALQDTSCQVHAWPDRRR |
| | | | WNQTCELLPVSQASWACNLILGAPDSQKLTTVDIVTLRVLCREGVR |
| | | | WRVMAIQDFKPFENLRLMAPISLQVVHVETHRCNISWEISQASHY [symbol] |
| | | | ERHLEFEARTLSPGHTWEEAPLLTLKQKQEWICLETLTPDTQYEFQV |
| | | | RVKPLQGEFTTWSPWSQPLAFRTKPAALGKD |
| | 450 | GSPG | VPLSLY |
| | 451 | PGSGS | AVNGTSQFTCFYNSRANISCVWSQDGALQDTSCQVHAWPDRRR |
| | | | WNQTCELLPVSQASWACNLILGAPDSQKLTTVDIVTLRVLCREGVR |
| | | | WRVMAIQDFKPFENLRLMAPISLQVVHVETHRCNISWEISQASHY [symbol] |
| | | | ERHLEFEARTLSPGHTWEEAPLLTLKQKQEWICLETLTPDTQYEFQV |
| | | | RVKPLQGEFTTWSPWSQPLAFRTKPAALGKD |
| | 451 | GSPG | VPLSLY |
| | 452 | PGSGS | AVNGTSQFTCFYNSRANISCVWSQDGALQDTSCQVHAWPDRRR |
| | | | WNQTCELLPVSQASWACNLILGAPDSQKLTTVDIVTLRVLCREGVR |
| | | | WRVMAIQDFKPFENLRLMAPISLQVVHVETHRCNISWEISQASHY [symbol] |
| | | | ERHLEFEARTLSPGHTWEEAPLLTLKQKQEWICLETLTPDTQYEFQV |
| | | | RVKPLQGEFTTWSPWSQPLAFRTKPAALGKD |
| | 452 | GSPG | VPLSLY |
| | 453 | PGSGS | AVNGTSQFTCFYNSRANISCVWSQDGALQDTSCQVHAWPDRRR |
| | | | WNQTCELLPVSQASWACNLILGAPDSQKLTTVDIVTLRVLCREGVR |
| | | | WRVMAIQDFKPFENLRLMAPISLQVVHVETHRCNISWEISQASHY [symbol] |
| | | | ERHLEFEARTLSPGHTWEEAPLLTLKQKQEWICLETLTPDTQYEFQV |
| | | | RVKPLQGEFTTWSPWSQPLAFRTKPAALGKD |
| | 453 | GSPG | VPLSLY |
| | 454 | PGSGS | AVNGTSQFTCFYNSRANISCVWSQDGALQDTSCQVHAWPDRRR |
| | | | WNQTCELLPVSQASWACNLILGAPDSQKLTTVDIVTLRVLCREGVR |
| | | | WRVMAIQDFKPFENLRLMAPISLQVVHVETHRCNISWEISQASHY [symbol] |
| | | | ERHLEFEARTLSPGHTWEEAPLLTLKQKQEWICLETLTPDTQYEFQV |
| | | | RVKPLQGEFTTWSPWSQPLAFRTKPAALGKD |
| | 454 | GSPG | VPLSLY |
| | 455 | PGSGS | AVNGTSQFTCFYNSRANISCVWSQDGALQDTSCQVHAWPDRRR |
| | | | WNQTCELLPVSQASWACNLILGAPDSQKLTTVDIVTLRVLCREGVR |
| | | | WRVMAIQDFKPFENLRLMAPISLQVVHVETHRCNISWEISQASHY [symbol] |
| | | | ERHLEFEARTLSPGHTWEEAPLLTLKQKQEWICLETLTPDTQYEFQV |
| | | | RVKPLQGEFTTWSPWSQPLAFRTKPAALGKD |
| | 455 | GSPG | VPLSLY |
| | 456 | PGSGS | AVNGTSQFTCFYNSRANISCVWSQDGALQDTSCQVHAWPDRRR |
| | | | WNQTCELLPVSQASWACNLILGAPDSQKLTTVDIVTLRVLCREGVR |
| | | | WRVMAIQDFKPFENLRLMAPISLQVVHVETHRCNISWEISQASHY [symbol] |
| | | | ERHLEFEARTLSPGHTWEEAPLLTLKQKQEWICLETLTPDTQYEFQV |
| | | | RVKPLQGEFTTWSPWSQPLAFRTKPAALGKD |
| | 456 | GSPG | VPLSLY |
| | 462 | GGSSPPGGGSSGGGSGP | APTSSSTKKTQLQLEHLLLDLQMILNGINNYKNPKLTAMLTAKFAM [symbol] |
| | | | KKATELKHLQCLEEALKPLEEVLNLAQSKNFHLRPRDLISNINVIVLEL |
| | | | KGSETTFMCEYADETATIVEFLNRWITFAQSIISTLT |
| | 462 | | |
| | 463 | GGSSPPGGGSSGGGSGP | APTSSSTKKTQLQEHLLLDLQMILNGINNYKNPKLTAMLTAKFAM [symbol] |
| | | | KKATELKHLQCLEEALKPLEEVLNLAQSKNFHLRPRDLISNINVIVLEL |
| | | | KGSETTFMCEYADETATIVEFLNRWITFAQSIISTLT |
| | 463 | PGSGS | AVNGTSQFTCFYNSRANISCVWSQDGALQDTSCQVHAWPDRRR |
| | | | WNQTCELLPVSQASWACNLILGAPDSQKLTTVDIVTLRVLCREGVR |
| | | | WRVMAIQDFKPFENLRLMAPISLQVVHVETHRCNISWEISQASHY [symbol] |
| | | | ERHLEFEARTLSPGHTWEEAPLLTLKQKQEWICLETLTPDTQYEFQV |
| | | | RVKPLQGEFTTWSPWSQPLAFRTKPAALGKD |
| | 464 | GGSSPPGGGSSGGGSGP | APTSSSTKKTQLQLEHLLLDLQMILNGINNYKNPKLTAMLTAKFAM [symbol] |
| | | | KKATELKHLQCLEEALKPLEEVLNLAQSKNFHLRPRDLISNINVIVLEL |
| | | | KGSETTFMCEYADETATIVEFLNRWITFAQSIISTLT |
| | 464 | PGSGS | AVKNCSHLECFYNSRANVSCMWSHEEALNVTTCHVHAKSNLRHW |
| | | | NKTCELTLVRQASWACNLILGSFPESQSLTSVDLLDINVVCWEEKG |
| | | | WRRVKTCDFHPFDNLRLVAPHSLQVLHIDTQRCNISWKVSQVSHY [symbol] |
| | | | EPYLEFEARRRLLGHSWEDASVLSLKQRQQWLFLEMLIPSTSYEVQ [symbol] |
| | | | RVKAQRNNTGTWSPWSQPLTFRTRPADPMKE |
| | 465 | GSPG | VPLSLY |
| | 465 | | |
| | 466 | GSPG | VPLSLY |
| | 466 | PGSGS | AVNGTSQFTCFYNSRANISCVWSQDGALQDTSCQVHAWPDRRR |
| | | | WNQTCELLPVSQASWACNLILGAPDSQKLTTVDIVTLRVLCREGVR |
| | | | WRVMAIQDFKPFENLRLMAPISLQVVHVETHRCNISWEISQASHY [symbol] |
| | | | ERHLEFEARTLSPGHTWEEAPLLTLKQKQEWICLETLTPDTQYEFQV |
| | | | RVKPLQGEFTTWSPWSQPLAFRTKPAALGKD |
| | 467 | GSPG | VPLSLY |
| | 467 | PGSGS | AVKNCSHLECFYNSRANVSCMWSHEEALNVTTCHVHAKSNLRHW |
| | | | NKTCELTLVRQASWACNLILGSFPESQSLTSVDLLDINVVCWEEKG |
| | | | WRRVKTCDFHPFDNLRLVAPHSLQVLHIDTQRCNISWKVSQVSHY [symbol] |
| | | | EPYLEFEARRRLLGHSWEDASVLSLKQRQQWLFLEMLIPSTSYEVQ [symbol] |
| | | | RVKAQRNNTGTWSPWSQPLTFRTRPADPMKE |
| | 468 | PGSGS | AVNGTSQFTCFYNSRANISCVWSQDGALQDTSCQVHAWPDRRR |
| | | | WNQTCELLPVSQASWACNLILGAPDSQKLTTVDIVTLRVLCREGVR |
| | | | WRVMAIQDFKPFENLRLMAPISLQVVHVETHRCNISWEISQASHY [symbol] |
| | | | ERHLEFEARTLSPGHTWEEAPLLTLKQKQEWICLETLTPDTQYEFQV |
| | | | RVKPLQGEFTTWSPWSQPLAFRTKPAALGKD |
| | 468 | GSPG | VPLSLY |
| | 469 | PGSGS | AVNGTSQFTCFYNSRANISCVWSQDGALQDTSCQVHAWPDRRR |
| | | | WNQTCELLPVSQASWACNLILGAPDSQKLTTVDIVTLRVLCREGVR |
| | | | WRVMAIQDFKPFENLRLMAPISLQVVHVETHRCNISWEISQASHY [symbol] |
| | | | ERHLEFEARTLSPGHTWEEAPLLTLKQKQEWICLETLTPDTQYEFQV |
| | | | RVKPLQGEFTTWSPWSQPLAFRTKPAALGKD |
| | 469 | GGSSPPGGGSSGGGSGP | APTSSSTKKTQLQLEHLLLDLQMILNGINNYKNPKLTAMLTAKFAM [symbol] |
| | | | KKATELKHLQCLEEALKPLEEVLNLAQSKNFHLRPRDLISNINVIVLEL |
| | | | KGSETTFMCEYADETATIVEFLNRWITFAQSIISTLT |
| | 470 | PGSGS | AVNGTSQFTCFYNSRANISCVWSQDGALQDTSCQVHAWPDRRR |
| | | | WNQTCELLPVSQASWACNLILGAPDSQKLTTVDIVTLRVLCREGVR |
| | | | WRVMAIQDFKPFENLRLMAPISLQVVHVETHRCNISWEISQASHY [symbol] |
| | | | ERHLEFEARTLSPGHTWEEAPLLTLKQKQEWICLETLTPDTQYEFQV |
| | | | RVKPLQGEFTTWSPWSQPLAFRTKPAALGKD |
| | 470 | GGSSPPGGGSSGGGSGP | APTSSSTKKTQLQLEHLLLDLQMILNGINNYKNPKLTAMLTAKFAM [symbol] |
| | | | KKATELKHLQCLEEALKPLEEVLNLAQSKNFHLRPRDLISNINVIVLEL |
| | | | KGSETTFMCEYADETATIVEFLNRWITFAQSIISTLT |
| | 471 | PGSGS | AVNGTSQFTCFYNSRANISCVWSQDGALQDTSCQVHAWPDRRR |
| | | | WNQTCELLPVSQASWACNLILGAPDSQKLTTVDIVTLRVLCREGVR |
| | | | WRVMAIQDFKPFENLRLMAPISLQVVHVETHCRNISWEISQASHY [symbol] |
| | | | ERHLEFEARTLSPGHTWEEAPLLTLKQKQEWICLETLTPDTQYEFQV |
| | | | RVKPLQGEFTTWSPWSQPLAFRTKPAALGKD |
| | 471 | GSPG | VPLSLY |
| | 475 | GGSSPPGGGSSGGGSGP | APTSSTKKTQLQEHLLLDLQMILNGINNYKNPKLTAMLTAKFAM [symbol] |
| | | | KKATELKHLQCLEEALKPLEEVLNLAQSKNFHLRPRDLISNINVIVLEL |
| | | | KGSETTFMCEYADETATIVEFLNRWITFAQSIISTLT |
| | 475 | PGSGS | AVNGTSQFTCFYNSRANISCVWSQDGALQDTSCQVHAWPDRRR |
| | | | WNQTCELLPVSQASWACNLILGAPDSQKLTTVDIVTLRVLCREGVR |
| | | | WRVMAIQDFKPFENLRLMAPISLQVVHVETHRCNISWEISQASHY [symbol] |
| | | | ERHLEFEARTLSPGHTWEEAPLLTLKQKQEWISLETLTPDTQYEFQV |
| | | | RVKPLQGEFTTWSPWSQPLAFRTKPAALGKD |
| | 476 | GSPG | VPLSLY |
| | 476 | PGSGS | AVNGTSQFTCFYNSRANISCVWSQDGALQDTSCQVHAWPDRRR |
| | | | WNQTCELLPVSQASWACNLILGAPDSQKLTTVDIVTLRVLCREGVR |
| | | | WRVMAIQDFKPFENLRLMAPISLQVVHVETHRCNISWEISQASHYF |
| | | | ERHLEFEARTLSPGHTWEEAPLLTLKQKQEWISLETLTPDTQYEFQV |
| | | | RVKPLQGEFTTWSPWSQPLAFRTKPAALGKD |
| | 477 | | |
| | 477 | GSPG | VPLSLY |
| | 484 | | |
| | 484 | GSPG | VPLSLY |
| | 485 | | |
| | 485 | GSPG | VPLSLY |
| | 486 | | |
| | 486 | GSPG | VPLSLY |
| | 487 | | |
| | 487 | GSPG | VPLSLY |
| | 488 | | |
| | 488 | GSPG | VPLSLY |
| | 489 | | |
| | 489 | GSPG | VPLSLY |
| | 490 | | |
| | 490 | GSPG | VPLSLY |
| | 491 | | |
| | 491 | GSPG | VPLSLY |
| | 492 | | |
| | 492 | GSPG | VPLSLY |
| | 493 | PGSGS | AVNGTSQFTCFYNSRANISCVWSQDGALQDTSCQVHAWPDRRR |
| | | | WNQTCELLPVSQASWACNLILGAPDSQKLTTVDIVTLRVLCREGVR |
| | | | WRVMAIQDFKPFENLRLMAPISLQVVHVETHRCNISWEISQASHY [symbol] |
| | | | ERHLEFEARTLSPGHTWEEAPLLTLKQKQEWICLETLTPDTQYEFQV |
| | | | RVKPLQGEFTTWSPWSQPLAFRTKPAALGKD |
| | 493 | GSPG | VPLSLY |
| | 494 | PGSGS | AVNGTSQFTCFYNSRANISCVWSQDGALQDTSCQVHAWPDRRR |
| | | | WNQTCELLPVSQASWACNLILGAPDSQKLTTVDIVTLRVLCREGVR |
| | | | WRVMAIQDFKPFENLRLMAPISLQVVHVETHRCNISWEISQASHY [symbol] |
| | | | ERHLEFEARTLSPGHTWEEAPLLTLKQKQEWICLETLTPDTQYEFQV |
| | | | RVKPLQGEFTTWSPWSQPLAFRTKPAALGKD |
| | 494 | GSPG | VPLSLY |
| | 495 | PGSGS | AVNGTSQFTCFYNSRANISCVWSQDGALQDTSCQVHAWPDRRR |
| | | | WNQTCELLPVSQASWACNLILGAPDSQKLTTVDIVTLRVLCREGVR |
| | | | WRVMAIQDFKPFENLRLMAPISLQVVHVETHRCNISWEISQASHY [symbol] |
| | | | ERHLEFEARTLSPGHTWEEAPLLTLKQKQEWICLETLTPDTQYEFQV |
| | | | RVKPLQGEFTTWSPWSQPLAFRTKPAALGKD |
| | 495 | GSPG | VPLSLY |
| | 496 | PGSGS | AVNGTSQFTCFYNSRANISCVWSQDGALQDTSCQVHAWPDRRR |
| | | | WNQTCELLPVSQASWACNLILGAPDSQKLTTVDIVTLRVLCREGVR |
| | | | WRVMAIQDFKPFENLRLMAPISLQVVHVETHRCNISWEISQASHY [symbol] |
| | | | ERHLEFEARTLSPGHTWEEAPLLTLKQKQEWICLETLTPDTQYEFQV |
| | | | RVKPLQGEFTTWSPWSQPLAFRTKPAALGKD |
| | 496 | GSPG | VPLSLY |
| | 497 | PGSGS | AVNGTSQFTCFYNSRANISCVWSQDGALQDTSCQVHAWPDRRR |
| | | | WNQTCELLPVSQASWACNLILGAPDSQKLTTVDIVTLRVLCREGVR |
| | | | WRVMAIQDFKPFENLRLMAPISLQVVHVETHRCNISWEISQASHY [symbol] |
| | | | ERHLEFEARTLSPGHTWEEAPLLTLKQKQEWICLETLTPDTQYEFQV |
| | | | RVKPLQGEFTTWSPWSQPLAFRTKPAALGKD |
| | 497 | GSPG | VPLSLY |
| | 498 | PGSGS | AVNGTSQFTCFYNSRANISCVWSQDGALQDTSCQVHAWPDRRR |
| | | | WNQTCELLPVSQASWACNLILGAPDSQKLTTVDIVTLRVLCREGVR |
| | | | WRVMAIQDFKPFENLRLMAPISLQVVHVETHRCNISWEISQASHY [symbol] |
| | | | ERHLEFEARTLSPGHTWEEAPLLTLKQKQEWICLETLTPDTQYEFQV |
| | | | RVKPLQGEFTTWSPWSQPLAFRTKPAALGKD |
| | 498 | GSPG | VPLSLY |
| | 499 | PGSGS | AVNGTSQFTCFYNSRANISCVWSQDGALQDTSCQVHAWPDRRR |
| | | | WNQTCELLPVSQASWACNLILGAPDSQKLTTVDIVTLRVLCREGVR |
| | | | WRVMAIQDFKPFENLRLMAPISLQVVHVETHRCNISWEISQASHY [symbol] |
| | | | ERHLEFEARTLSPGHTWEEAPLLTLKQKQEWICLETLTPDTQYEFQV |
| | | | RVKPLQGEFTTWSPWSQPLAFRTKPAALGKD |
| | 499 | GSPG | VPLSLY |
| | 500 | PGSGS | AVNGTSQFTCFYNSRANISCVWSQDGALQDTSCQVHAWPDRRR |
| | | | WNQTCELLPVSQASWACNLILGAPDSQKLTTVDIVTLRVLCREGVR |
| | | | WRVMAIQDFKPFENLRLMAPISLQVVHVETHRCNISWEISQASHY [symbol] |
| | | | ERHLEFEARTLSPGHTWEEAPLLTLKQKQEWICLETLTPDTQYEFQV |
| | | | RVKPLQGEFTTWSPWSQPLAFRTKPAALGKD |
| | 500 | GSPG | VPLSLY |
| | 501 | PGSGS | AVNGTSQFTCFYNSRANISCVWSQDGALQDTSCQVHAWPDRRR |
| | | | WNQTCELLPVSQASWACNLILGAPDSQKLTTVDIVTLRVLCREGVR |
| | | | WRVMAIQDFKPFENLRLMAPISLQVVHVETHRCNISWEISQASHY [symbol] |
| | | | ERHLEFEARTLSPGHTWEEAPLLTLKQKQEWICLETLTPDTQYEFQV |
| | | | RVKPLQGEFTTWSPWSQPLAFRTKPAALGKD |
| | 501 | GSPG | VPLSLY |
| | 502 | GPPSGSSPG | VPLSLY |
| | 502 | GGSSPPGGGSSGGGSGP | APTSSSTKKTQLQLEHLLLDLQMILNGINNYKNPKLTAMLTAKFAM [symbol] |
| | | | KKATELKHLQCLEEALKPLEEVLNLAQSKNFHLRPRDLISNINVIVLEL |
| | | | KGSETTFMCEYADETATIVEFLNRWITFAQSIISTLT |
| | 503 | GGSSPPGGGSSGGGSGP | APTSSSTKKTQLQLEHLLLDLQMILNGINNYKNPKLTAMLTAKFAM [symbol] |
| | | | KKATELKHLQCLEEALKPLEEVLNLAQSKNFHLRPRDLISNINVIVLEL |
| | | | KGSETTFMCEYADETATIVEFLNRWITFAQSIISTLT |
| | 503 | GPPSGSSP | RAAAVKSP |
| | 504 | PGSGS | AVNGTSQFTCFYNSRANISCVWSQDGALQDTSCQVHAWPDRRR |
| | | | WNQTCELLPVSQASWACNLILGAPDSQKLTTVDIVTLRVLCREGVR |
| | | | WRVMAIQDFKPFENLRLMAPISLQVVHVETHRCNISWEISQASHY [symbol] |
| | | | ERHLEFEARTLSPGHTWEEAPLLTLKQKQEWICLETLTPDTQYEFQV |
| | | | RVKPLQGEFTTWSPWSQPLAFRTKPAALGKD |
| | 504 | GSPG | VPLSLY |
| | 505 | PGSGS | AVNGTSQFTCFYNSRANISCVWSQDGALQDTSCQVHAWPDRRR |
| | | | WNQTCELLPVSQASWACNLILGAPDSQKLTTVDIVTLRVLCREGVR |
| | | | WRVMAIQDFKPFENLRLMAPISLQVVHVETHRCNISWEISQASHY [symbol] |
| | | | ERHLEFEARTLSPGHTWEEAPLLTLKQKQEWICLETLTPDTQYEFQV |
| | | | RVKPLQGEFTTWSPWSQPLAFRTKPAALGKD |
| | 505 | GGSSPPGGGSSGGGSGP | APTSSSTKKTQLQLEHLLLDLQMILNGINNYKNPKLTAMLTAKFAM [symbol] |
| | | | KKATELKHLQCLEEALKPLEEVLNLAQSKNFHLRPRDLISNINVIVLEL |
| | | | KGSETTFMCEYADETATIVEFLNRWITFAQSIISTLT |
| | 508 | GGSSPPGGGSSGGGSGP | APTSSSTKKTQLQLEHLLLDLQMILNGINNYKNPKLTAMLTAKFAM [symbol] |
| | | | KKATELKHLQCLEEALKPLEEVLNLAQSKNFHLRPRDLISNINVIVLEL |
| | | | KGSETTFMCEYADETATIVEFLNRWITFAQSIISTLT |
| | 508 | GPPSGSSPG | VPLSLY |
| | 509 | PGSGS | AVNGTSQFTCFYNSRANISCVWSQDGALQDTSCQVHAWPDRRR |
| | | | WNQTCELLPVSQASWACNLILGAPDSQKLTTVDIVTLRVLCREGVR |
| | | | WRVMAIQDFKPFENLRLMAPISLQVVHVETHRCNISWEISQASHY [symbol] |
| | | | ERHLEFEARTLSPGHTWEEAPLLTLKQKQEWICLETLTPDTQYEFQV |
| | | | RVKPLQGEFTTWSPWSQPLAFRTKPAALGKD |
| | 509 | GGSSPP | MPYDLYHP |
| | 510 | GGSSPPGGGSSGGGSGP | APTSSSTKKTQLQLEHLLLDLQMILNGINNYKNPKLTAMLTAKFAM [symbol] |
| | | | KKATELKHLQCLEEALKPLEEVLNLAQSKNFHLRPRDLISNINVIVLEL |
| | | | KGSETTFMCEYADETATIVEFLNRWITFAQSIISTLT |
| | 510 | GPPSGSSP | MPYDLYHP |
| | 511 | GGSSPPGGGSSGGGSGP | APTSSSTKKTQLQLEHLLLDLQMILNGINNYKNPKLTAMLTAKFAM [symbol] |
| | | | KKATELKHLQCLEEALKPLEEVLNLAQSKNFHLRPRDLISNINVIVLEL |
| | | | KGSETTFMCEYADETATIVEFLNRWITFAQSIISTLT |
| | 511 | PSGSSPG | VPLSLY |
| | 512 | GGSSPPGGGSSGGGSGP | APTSSSTKKTQLQLEHLLLDLQMILNGINNYKNPKLTAMLTAKFAM [symbol] |
| | | | KKATELKHLQCLEEALKPLEEVLNLAQSKNFHLRPRDLISNINVIVLEL |
| | | | KGSETTFMCEYADETATIVEFLNRWITFAQSIISTLT |
| | 512 | | |
| | 513 | GGSSPPGGGSSGGGSGP | APTSSSTKKTQLQLEHLLLDLQMILNGINNYKNPKLTAMLTAKFAM [symbol] |
| | | | KKATELKHLQCLEEALKPLEEVLNLAQSKNFHLRPRDLISNINVIVLEL |
| | | | KGSETTFMCEYADETATIVEFLNRWITFAQSIISTLT |
| | 513 | | |
| | 526 | GGSSPPGGGSSGGGSGP | APTSSSTKKTQLQLEHLLLDLQMILNGINNYKNPKLTAMLTAKFAM [symbol] |
| | | | KKATELKHLQCLEEALKPLEEVLNLAQSKNFHLRPRDLISNINVIVLEL |
| | | | KGSETTFMCEYADETATIVEFLNRWITFAQSIISTLT |
| | 526 | GPPSGSSPG | VPLSLY |
| | 530 | GGSSPPGGGSSGGGSGP | APTSSSTKKTQLQLEHLLLDLQMILNGINNYKNPKLTAMLTAKFAM [symbol] |
| | | | KKATELKHLQCLEEALKPLEEVLNLAQSKNFHLRPRDLISNINVIVLEL |
| | | | KGSETTFMCEYADETATIVEFLNRWITFAQSIISTLT |
| | 530 | GPPSGSSP | MPYDLYHP |
| | 531 | GGSSPPGGGSSGGGSGP | APTSSSTKKTQLQLEHLLLDLQMILNGINNYKNPKLTAMLTAKFAM [symbol] |
| | | | KKATELKHLQCLEEALKPLEEVLNLAQSKNFHLRPRDLISNINVIVLEL |
| | | | KGSETTFMCEYADETATIVEFLNRWITFAQSIISTLT |
| | 531 | GPPSGSSPG | DSGGFMLT |
| | 532 | PGSGS | AVNGTSQFTCFYNSRANISCVWSQDGALQDTSCQVHAWPDRRR |
| | | | WNQTCELLPVSQASWACNLILGAPDSQKLTTVDIVTLRVLCREGVR |
| | | | WRVMAIQDFKPFENLRLMAPISLQVVHVETHRCNISWEISQASHY [symbol] |
| | | | ERHLEFEARTLSPGHTWEEAPLLTLKQKQEWICLETLTPDTQYEFQV |
| | | | RVKPLQGEFTTWSPWSQPLAFRTKPAALGKD |
| | 532 | GSPG | VPLSLY |
| | | | Component4 |
| [symbol] olecule | name | newnames | Sequence |
| [symbol] 368 | DNA187 | Hole: | |
| | | hFc(N297A)- | |
| | | hCD122 | |
| [symbol] 368 | DNA476 | Knob: | GP |
| | | hFc(N297A)- | |
| | | [NPMGSDPV | |
| | | NFKLLRVVNG]- | |
| | | hIL2(F42S, | |
| | | E62S, C125A) | |
| [symbol] 375 | DNA477 | Knob: | |
| | | mFcIgG2a(LA | |
| | | LAPG)- | |
| | | hIL2(R38A, | |
| | | F42A, Y45A, | |
| | | E62A, C125A) | |
| [symbol] 375 | DNA479 | Hole: | |
| | | mFcIgG2a(LA | |
| | | LAPG) | |
| [symbol] 376 | DNA478 | Knob: | SGP |
| | | mFcIgG2a(LA | |
| | | LAPG)- | |
| | | [VPLSLY]- | |
| | | hIL2(R38A, | |
| | | F42A, Y45A, | |
| | | E62A, C125A) | |
| [symbol] 376 | DNA479 | Hole: | |
| | | mFcIgG2a(LA | |
| | | LAPG) | |
| [symbol] 377 | DNA477 | Knob: | |
| | | mFcIgG2a(LA | |
| | | LAPG)- | |
| | | hIL2(R38A, | |
| | | F42A, Y45A, | |
| | | E62A, C125A) | |
| [symbol] 377 | DNA480 | Hole: | |
| | | mFcIgG2a(LA | |
| | | LAPG)- | |
| | | hCD122 | |
| [symbol] 378 | DNA478 | Knob: | SGP |
| | | mFcIgG2a(LA | |
| | | LAPG)- | |
| | | [VPLSLY]- | |
| | | hIL2(R38A, | |
| | | F42A, Y45A, | |
| | | E62A, C125A) | |
| [symbol] 378 | DNA480 | Hole: | |
| | | mFcIgG2a(LA | |
| | | LAPG)- | |
| | | hCD122 | |
| [symbol] 397 | DNA158 | Hole: | |
| | | hFc(N297A) | |
| [symbol] 397 | DNA278 | Knob: | SGP |
| | | hFc(N297A)- | |
| | | [DSGGFMLT]- | |
| | | hIL2(C125A) | |
| [symbol] 429 | DNA477 | Knob: | |
| | | mFcIgG2a(LA | |
| | | LAPG)- | |
| | | hIL2(R38A, | |
| | | F42A, Y45A, | |
| | | E62A, C125A) | |
| [symbol] 429 | DNA520 | Hole: | |
| | | mFcIgG2a(LA | |
| | | LAPG)- | |
| | | NoAnnotation | |
| | | Found | |
| [symbol] 430 | DNA477 | Knob: | |
| | | mFcIgG2a(LA | |
| | | LAPG)- | |
| | | hIL2(R38A, | |
| | | F42A, Y45A, | |
| | | E62A, C125A) | |
| [symbol] 430 | DNA521 | Hole: | GHHHHHHHH |
| | | mFcIgG2a(LA | |
| | | LAPG)- | |
| | | hCD122- | |
| | | NoAnnotation | |
| | | Found | |
| [symbol] 431 | DNA477 | Knob: | |
| | | mFcIgG2a(LA | |
| | | LAPG)- | |
| | | hIL2(R38A, | |
| | | F42A, Y45A, | |
| | | E62A, C125A) | |
| [symbol] 431 | DNA522 | Hole: | GHHHHHHHH |
| | | mFcIgG2a(LA | |
| | | LAPG)- | |
| | | mCD122- | |
| | | NoAnnotation | |
| | | Found | |
| [symbol] 432 | DNA478 | Knob: | SGP |
| | | mFcIgG2a(LA | |
| | | LAPG)- | |
| | | [VPLSLY]- | |
| | | hIL2(R38A, | |
| | | F42A, Y45A, | |
| | | E62A, C125A) | |
| [symbol] 432 | DNA521 | Hole: | GHHHHHHHH |
| | | mFcIgG2a(LA | |
| | | LAPG)- | |
| | | hCD122- | |
| | | NoAnnotation | |
| | | Found | |
| [symbol] 433 | DNA478 | Knob: | SGP |
| | | mFcIgG2a(LA | |
| | | LAPG)- | |
| | | [VPLSLY]- | |
| | | hIL2(R38A, | |
| | | F42A, Y45A, | |
| | | E62A, C125A) | |
| [symbol] 433 | DNA522 | Hole: | GHHHHHHHH |
| | | mFcIgG2a(LA | |
| | | LAPG)- | |
| | | mCD122- | |
| | | NoAnnotation | |
| | | Found | |
| [symbol] 435 | DNA263 | Knob: | SGP |
| | | hFc(N297A)- | |
| | | [VPLSLY]- | |
| | | hIL2(R38A, | |
| | | F42A, Y45A, | |
| | | E62A, C125A) | |
| [symbol] 435 | DNA516 | F8ScFvVersion1- | PGSGS |
| | | Hole:_ | |
| | | hFc(N297A)- PGSGS | |
| | | hCD122 | |
| [symbol] 436 | DNA187 | Hole: | |
| | | hFc(N297A)- | |
| | | hCD122 | |
| [symbol] 436 | DNA542 | Knob: | |
| | | hFc(N297A)- | |
| | | hIL2(R38A, | |
| | | F42A, Y45A, | |
| | | E62A, C125A) | |
| [symbol] 437 | DNA187 | Hole: | |
| | | hFc(N297A)- | |
| | | hCD122 | |
| [symbol] 437 | DNA545 | Knob: | |
| | | hFc(N297A)- | |
| | | hIL2(R38A, | |
| | | F42A, Y45A, | |
| | | E62A, C125A) | |
| [symbol] 438 | DNA255 | Knob: | |
| | | hFc(N297A)- | |
| | | hIL2(R38A, | |
| | | F42A, Y45A, | |
| | | E62A, C125A) | |
| [symbol] 438 | DNA543 | Hole: | GSGGG |
| | | hFc(N297A)- | |
| | | [VPLSLY]- | |
| | | hCD122 | |
| [symbol] 439 | DNA158 | Hole: | |
| | | hFc(N297A) | |
| [symbol] 439 | DNA544 | Knob: | SGP |
| | | hFc(N297A)- | |
| | | [VPLSLY]- | |
| | | hIL2(R38A, | |
| | | F42A, Y45A, | |
| | | E62A, L80F, | |
| | | R81D, L85V, | |
| | | I86V, I92F, | |
| | | C125A) | |
| [symbol] 440 | DNA187 | Hole: | |
| | | hFc(N297A)- | |
| | | hCD122 | |
| [symbol] 440 | DNA544 | Knob: | SGP |
| | | hFc(N297A)- | |
| | | [VPLSLY]- | |
| | | hIL2(R38A, | |
| | | F42A, Y45A, | |
| | | E62A, L80F, | |
| | | R81D, L85V, | |
| | | I86V, I92F, | |
| | | C125A) | |
| [symbol] 441 | DNA543 | Hole: | GSGGG |
| | | hFc(N297A)- | |
| | | [VPLSLY]- | |
| | | hCD122 | |
| [symbol] 441 | DNA546 | Knob: | |
| | | hFc(N297A)- | |
| | | hIL2(R38A, | |
| | | F42A, Y45A, | |
| | | E62A, L80F, | |
| | | R81D, L85V, | |
| | | I86V, I92F, | |
| | | C125A) | |
| [symbol] 442 | DNA255 | Knob: | |
| | | hFc(N297A)- | |
| | | hIL2(R38A, | |
| | | F42A, Y45A, | |
| | | E62A, C125A) | |
| [symbol] 442 | DNA553 | Hole: | SGGG |
| | | hFc(N297A)- | |
| | | [DSGGFMLT]- | |
| | | hCD122 | |
| [symbol] 443 | DNA187 | Hole: | |
| | | hFc(N297A)- | |
| | | hCD122 | |
| [symbol] 443 | DNA554 | Knob: | SGP |
| | | hFc(N297A)- | |
| | | [VPLSLY]- | |
| | | hIL2(E15R, | |
| | | L18C, D20R, | |
| | | R38A, F42A, | |
| | | Y45A, E62A) | |
| [symbol] 444 | DNA281 | Knob: | SGP |
| | | hFc(N297A)- | |
| | | [DSGGFMLT]- | |
| | | hIL2(R38A, | |
| | | F42A, Y45A, | |
| | | E62A, C125A) | |
| [symbol] 444 | DNA440 | Hole: | |
| | | hFc(N297A)- | |
| | | hCD122(C122S, | |
| | | C168S) | |
| [symbol] 449 | DNA547 | Hole: | |
| | | hFcIgG1(N297A + | |
| | | EPKSS)- | |
| | | Hole: | |
| | | hFc(N297A)- | |
| | | hCD122 | |
| [symbol] 449 | DNA550 | Knob: | |
| | | hFcIgG1(N297A + | |
| | | EPKSS)- | |
| | | hIL2(R38A, | |
| | | F42A, Y45A, | |
| | | E62A, C125A) | |
| [symbol] 450 | DNA548 | Hole: | |
| | | hFcIgG1(N297A + | |
| | | AKT)- | |
| | | Hole: | |
| | | hFc(N297A)- | |
| | | hCD122 | |
| [symbol] 450 | DNA551 | Knob: | SGP |
| | | hFcIgG1(N297A + | |
| | | AKT)- | |
| | | [VPLSLY]- | |
| | | hIL2(R38A, | |
| | | F42A, Y45A, | |
| | | E62A, C125A) | |
| [symbol] 451 | DNA549 | Hole: | |
| | | hFcIgG1(N297A + | |
| | | AKTEPKSS)- | |
| | | hCD122 | |
| [symbol] 451 | DNA552 | Knob: | SGP |
| | | hFcIgG1(N297A + | |
| | | AKTEPKSS)- | |
| | | [VPLSLY]- | |
| | | hIL2(R38A, | |
| | | F42A, Y45A, | |
| | | E62A, C125A) | |
| [symbol] 452 | DNA187 | Hole: | |
| | | hFc(N297A)- | |
| | | hCD122 | |
| [symbol] 452 | DNA563 | Knob: | SGP |
| | | hFc(N297A)- | |
| | | [VPLSLY]- | |
| | | hIL2(E15R, | |
| | | L18C, D20R, | |
| | | R38A, F42A, | |
| | | Y45A, E62A, | |
| | | N88L) | |
| [symbol] 453 | DNA187 | Hole: | |
| | | hFc(N297A)- | |
| | | hCD122 | |
| [symbol] 453 | DNA565 | Knob: | SGP |
| | | hFc(N297A)- | |
| | | [VPLSLY]- | |
| | | hIL2(E15L, | |
| | | L18C, D20R, | |
| | | R38A, F42A, | |
| | | Y45A, E62A, | |
| | | N88L) | |
| [symbol] 454 | DNA187 | Hole: | |
| | | hFc(N297A)- | |
| | | hCD122 | |
| [symbol] 454 | DNA566 | Knob: | SGP |
| | | hFc(N297A)- | |
| | | [VPLSLY]- | |
| | | hIL2(E15R, | |
| | | L18C, R38A, | |
| | | F42A, Y45A, | |
| | | E62A, N88L) | |
| [symbol] 455 | DNA187 | Hole: | |
| | | hFc(N297A)- | |
| | | hCD122 | |
| [symbol] 455 | DNA567 | Knob: | SGP |
| | | hFc(N297A)- | |
| | | [VPLSLY]- | |
| | | hIL2(L18C, | |
| | | D20R, R38A, | |
| | | F42A, Y45A, | |
| | | E62A, N88L) | |
| [symbol] 456 | DNA187 | Hole: | |
| | | hFc(N297A)- | |
| | | hCD122 | |
| [symbol] 456 | DNA568 | Knob: | SGP |
| | | hFc(N297A)- | |
| | | [VPLSLY]- | |
| | | hIL2(E15F, | |
| | | L18C, D20R, | |
| | | R38A, F42A, | |
| | | Y45A, E62A, | |
| | | N88L) | |
| [symbol] 462 | DNA530 | Knob: | |
| | | mFcIgG1(DAP | |
| | | G)- | |
| | | hIL2(R38A, | |
| | | F42A, Y45A, | |
| | | E62A, C125A) | |
| [symbol] 462 | DNA532 | Hole: | |
| | | mFcIgG1(DAPG) | |
| [symbol] 463 | DNA530 | Knob: | |
| | | mFcIgG1(DAPG)- | |
| | | hIL2(R38A, | |
| | | F42A, Y45A, | |
| | | E62A, C125A) | |
| [symbol] 463 | DNA533 | Hole: | |
| | | mFcIgG1(DAPG)- | |
| | | hCD122 | |
| [symbol] 464 | DNA530 | Knob: | |
| | | mFcIgG1(DAPG)- | |
| | | hIL2(R38A, | |
| | | F42A, Y45A, | |
| | | E62A, C125A) | |
| [symbol] 464 | DNA534 | Hole: | |
| | | mFcIgG1(DAPG)- | |
| | | mCD122 | |
| [symbol] 465 | DNA531 | Knob: | |
| | | mFcIgG1(DAPG)- | |
| | | [VPLSLY]- | |
| | | hIL2(R38A, | |
| | | F42A, Y45A, | |
| | | E62A, C125A) | |
| [symbol] 465 | DNA532 | Hole: | |
| | | mFcIgG1(DAPG) | |
| [symbol] 466 | DNA531 | Knob: | SGP |
| | | mFcIgG1(DAPG)- | |
| | | [VPLSLY]- | |
| | | hIL2(R38A, | |
| | | F42A, Y45A, | |
| | | E62A, C125A) | |
| [symbol] 466 | DNA533 | Hole: | |
| | | mFcIgG1(DAPG)- | |
| | | hCD122 | |
| [symbol] 467 | DNA531 | Knob: | SGP |
| | | mFcIgG1(DAPG)- | |
| | | [VPLSLY]- | |
| | | hIL2(R38A, | |
| | | F42A, Y45A, | |
| | | E62A, C125A) | |
| [symbol] 467 | DNA534 | Hole: | |
| | | mFcIgG1(DAPG)- | |
| | | mCD122 | |
| [symbol] 468 | DNA576 | Hole: | |
| | | hFc(N297A, | |
| | | M252Y, | |
| | | S254T, | |
| | | T256E)- | |
| | | hCD122 | |
| [symbol] 468 | DNA580 | Knob: | SGP |
| | | hFc(N297A, | |
| | | M252Y, | |
| | | S254T, | |
| | | T256E)- | |
| | | [VPLSLY]- | |
| | | hIL2(R38A, | |
| | | F42A, Y45A, | |
| | | E62A, C125A) | |
| [symbol] 469 | DNA575 | Hole: | |
| | | hFc(N297A, | |
| | | I253A)- | |
| | | hCD122 | |
| [symbol] 469 | DNA577 | Knob: | |
| | | hFc(N297, | |
| | | I253A)- | |
| | | hIL2(R38A, | |
| | | F42A, Y45A, | |
| | | E62A, C125A) | |
| [symbol] 470 | DNA576 | Hole: | |
| | | hFc(N297A, | |
| | | M252Y, | |
| | | S254T, | |
| | | T256E)- | |
| | | hCD122 | |
| [symbol] 470 | DNA578 | Knob: | |
| | | hFc(N297A, | |
| | | M252Y, | |
| | | S254T, | |
| | | T256E)- | |
| | | hIL2(R38A, | |
| | | F42A, Y45A, | |
| | | E62A, C125A) | |
| [symbol] 471 | DNA575 | Hole: | |
| | | hFc(N297A, | |
| | | I253A)- | |
| | | hCD122 | |
| [symbol] 471 | DNA579 | Knob: | SGP |
| | | hFc(N297, | |
| | | I253A)- | |
| | | [VPLSLY]- | |
| | | hIL2(R38A, | |
| | | F42A, Y45A, | |
| | | E62A, C125A) | |
| [symbol] 475 | DNA255 | Knob: | |
| | | hFc(N297A)- | |
| | | hIL2(R38A, | |
| | | F42A, Y45A, | |
| | | E62A, C125A) | |
| [symbol] 475 | DNA528 | Hole: | |
| | | hFc(N297A)- | |
| | | hCD122(C168S) | |
| [symbol] 476 | DNA263 | Knob: | SGP |
| | | hFc(N297A)- | |
| | | [VPLSLY]- | |
| | | hIL2(R38A, | |
| | | F42A, Y45A, | |
| | | E62A, C125A) | |
| [symbol] 476 | DNA528 | Hole: | |
| | | hFc(N297A)- | |
| | | hCD122(C168S) | |
| [symbol] 477 | DNA158 | Hole: | |
| | | hFc(N297A) | |
| [symbol] 477 | DNA554 | Knob: | SGP |
| | | hFc(N297A)- | |
| | | [VPLSLY]- | |
| | | hIL2(E15R, | |
| | | L18C, D20R, | |
| | | R38A, F42A, | |
| | | Y45A, E62A) | |
| [symbol] 484 | DNA158 | Hole: | |
| | | hFc(N297A) | |
| [symbol] 484 | DNA581 | Knob: | |
| | | hFc(N297A)- | |
| | | [VPLSLY]- | |
| | | hIL2(L18C, | |
| | | R38A, F42A, | |
| | | Y45A, E62A) | |
| [symbol] 485 | DNA158 | Hole: | |
| | | hFc(N297A) | |
| [symbol] 485 | DNA582 | Knob: | SGP |
| | | hFc(N297A)- | |
| | | [VPLSLY]- | |
| | | hIL2(H16Y, | |
| | | R38A, F42A, | |
| | | Y45A, E62A, | |
| | | C125A) | |
| [symbol] 486 | DNA158 | Hole: | |
| | | hFc(N297A) | |
| [symbol] 486 | DNA583 | Knob: | SGP |
| | | hFc(N297A)- | |
| | | [VPLSLY]- | |
| | | hIL2(H16E, | |
| | | R38A, F42A, | |
| | | Y45A, E62A, | |
| | | C125A) | |
| [symbol] 487 | DNA158 | Hole: | |
| | | hFc(N297A) | |
| [symbol] 487 | DNA584 | Knob: | SGP |
| | | hFc(N297A)- | |
| | | [VPLSLY]- | |
| | | hIL2(D20L, | |
| | | R38A, F42A, | |
| | | Y45A, E62A, | |
| | | C125A) | |
| [symbol] 488 | DNA158 | Hole: | |
| | | hFc(N297A) | |
| [symbol] 488 | DNA585 | Knob: | SGP |
| | | hFc(N297A)- | |
| | | [VPLSLY]- | |
| | | hIL2(H16Y, | |
| | | L18C, R38A, | |
| | | F42A, Y45A, | |
| | | E62A) | |
| [symbol] 489 | DNA158 | Hole: | |
| | | hFc(N297A) | |
| [symbol] 489 | DNA586 | Knob: | SGP |
| | | hFc(N297A)- | |
| | | [VPLSLY]- | |
| | | hIL2(H16E, | |
| | | L18C, R38A, | |
| | | F42A, Y45A, | |
| | | E62A) | |
| [symbol] 490 | DNA158 | Hole: | |
| | | hFc(N297A) | |
| [symbol] 490 | DNA587 | Knob: | SGP |
| | | hFc(N297A)- | |
| | | [VPLSLY]- | |
| | | hIL2(L18C, | |
| | | D20L, R38A, | |
| | | F42A, Y45A, | |
| | | E62A) | |
| [symbol] 491 | DNA158 | Hole: | |
| | | hFc(N297A) | |
| [symbol] 491 | DNA588 | Knob: | SGP |
| | | hFc(N297A)- | |
| | | [VPLSLY]- | |
| | | hIL2(H16Y, | |
| | | L18C, D20L, | |
| | | R38A, F42A, | |
| | | Y45A, E62A) | |
| [symbol] 492 | DNA158 | Hole: | |
| | | hFc(N297A) | |
| [symbol] 492 | DNA589 | Knob: | SGP |
| | | hFc(N297A)- | |
| | | [VPLSLY]- | |
| | | hIL2(H16E, | |
| | | L18C, D20L, | |
| | | R38A, F42A, | |
| | | Y45A, E62A) | |
| [symbol] 493 | DNA187 | Hole: | |
| | | hFc(N297A)- | |
| | | hCD122 | |
| [symbol] 493 | DNA581 | Knob: | SGP |
| | | hFc(N297A)- | |
| | | [VPLSLY]- | |
| | | hIL2(L18C, | |
| | | R38A, F42A, | |
| | | Y45A, E62A) | |
| [symbol] 494 | DNA187 | Hole: | |
| | | hFc(N297A)- | |
| | | hCD122 | |
| [symbol] 494 | DNA582 | Knob: | SGP |
| | | hFc(N297A)- | |
| | | [VPLSLY]- | |
| | | hIL2(H16Y, | |
| | | R38A, F42A, | |
| | | Y45A, E62A, | |
| | | C125A) | |
| [symbol] 495 | DNA187 | Hole: | |
| | | hFc(N297A)- | |
| | | hCD122 | |
| [symbol] 495 | DNA583 | Knob: | SGP |
| | | hFc(N297A)- | |
| | | [VPLSLY]- | |
| | | hIL2(H16E, | |
| | | R38A, F42A, | |
| | | Y45A, E62A, | |
| | | C125A) | |
| [symbol] 496 | DNA187 | Hole: | |
| | | hFc(N297A)- | |
| | | hCD122 | |
| [symbol] 496 | DNA584 | Knob: | SGP |
| | | hFc(N297A)- | |
| | | [VPLSLY]- | |
| | | hIL2(D20L, | |
| | | R38A, F42A, | |
| | | Y45A, E62A, | |
| | | C125A) | |
| [symbol] 497 | DNA187 | Hole: | |
| | | hFc(N297A)- | |
| | | hCD122 | |
| [symbol] 497 | DNA585 | Knob: | SGP |
| | | hFc(N297A)- | |
| | | [VPLSLY]- | |
| | | hIL2(H16Y, | |
| | | L18C, R38A, | |
| | | F42A, Y45A, | |
| | | E62A) | |
| [symbol] 498 | DNA187 | Hole: | |
| | | hFc(N297A)- | |
| | | hCD122 | |
| [symbol] 498 | DNA586 | Knob: | SGP |
| | | hFc(N297A)- | |
| | | [VPLSLY]- | |
| | | hIL2(H16E, | |
| | | L18C, R38A, | |
| | | F42A, Y45A, | |
| | | E62A) | |
| [symbol] 499 | DNA187 | Hole: | |
| | | hFc(N297A)- | |
| | | hCD122 | |
| [symbol] 499 | DNA587 | Knob: | SGP |
| | | hFc(N297A)- | |
| | | [VPLSLY]- | |
| | | hIL2(L18C, | |
| | | D20L, R38A, | |
| | | F42A, Y45A, | |
| | | E62A) | |
| [symbol] 500 | DNA187 | Hole: | |
| | | hFc(N297A)- | |
| | | hCD122 | |
| [symbol] 500 | DNA588 | Knob: | |
| | | hFc(N297A)- | |
| | | [VPLSLY]- | |
| | | hIL2(H16Y, | |
| | | L18C, D20L, | |
| | | R38A, F42A, | |
| | | Y45A, E62A) | |
| [symbol] 501 | DNA187 | Hole: | |
| | | hFc(N297A)- | |
| | | hCD122 | |
| [symbol] 501 | DNA589 | Knob: | SGP |
| | | hFc(N297A)- | |
| | | [VPLSLY]- | |
| | | hIL2(H16E, | |
| | | L18C, D20L, | |
| | | R38A, F42A, | |
| | | Y45A, E62A) | |
| [symbol] 502 | DNA543 | Hole: | GSGGG |
| | | hFc(N297A)- | |
| | | [VPLSLY]- | |
| | | hCD122 | |
| [symbol] 502 | DNA577 | Knob: | |
| | | hFc(N297, | |
| | | I253A)- | |
| | | hIL2(R38A, | |
| | | F42A, Y45A, | |
| | | E62A, C125A) | |
| [symbol] 503 | DNA255 | Knob: | |
| | | hFc(N297A)- | |
| | | hIL2(R38A, | |
| | | F42A, Y45A, | |
| | | E62A, C125A) | |
| [symbol] 503 | DNA606 | Hole: | SGGG |
| | | hFc(N297A)- | |
| | | [RAAAVKSP]- | |
| | | hCD122 | |
| [symbol] 504 | DNA603 | Hole: | |
| | | hFcIgG4- | |
| | | hCD122 | |
| [symbol] 504 | DNA605 | Knob: | SGP |
| | | hFcIgG4-hIL2- | |
| | | [VPLSLY)SGP | |
| | | hIL2(R38A, | |
| | | F42A, Y45A, | |
| | | E62A, C125A) | |
| [symbol] 505 | DNA603 | Hole: | |
| | | hFcIgG4- | |
| | | hCD122 | |
| [symbol] 505 | DNA604 | Knob: IgG4 | |
| | | hFc- | |
| | | hIL2(R38A, | |
| | | F42A, Y45A, | |
| | | E62A, C125A) | |
| [symbol] 508 | DNA577 | Knob: | |
| | | hFc(N297, | |
| | | I253A)- | |
| | | hIL2(R38A, | |
| | | F42A, Y45A, | |
| | | E62A, C125A) | |
| [symbol] 508 | DNA609 | Hole: | GSGGG |
| | | hFc(N297A, | |
| | | I253A)- | |
| | | [VPLSLY]- | |
| | | hCD122 | |
| [symbol] 509 | DNA575 | Hole: | |
| | | hFc(N297A, | |
| | | I253A)- | |
| | | hCD122 | |
| [symbol] 509 | DNA623 | Knob: | SGP |
| | | hFc(N297, | |
| | | I253A)- | |
| | | [MPYDLYHP]- | |
| | | hIL2(R38A, | |
| | | F42A, Y45A, | |
| | | E62A, C125A) | |
| [symbol] 510 | DNA577 | Knob: | |
| | | hFc(N297, | |
| | | I253A)- | |
| | | hIL2(R38A, | |
| | | F42A, Y45A, | |
| | | E62A, C125A) | |
| [symbol] 510 | DNA608 | Hole: | SGGG |
| | | hFc(N297A, | |
| | | I253A)- | |
| | | [MPYDLYHP]- | |
| | | hCD122 | |
| [symbol] 511 | DNA604 | Knob: IgG4 | |
| | | hFc- | |
| | | hIL2(R38A, | |
| | | F42A, Y45A, | |
| | | E62A, C125A) | |
| [symbol] 511 | DNA621 | Hole: | GSGGG |
| | | hFcIgG4- | |
| | | [VPLSLY]- | |
| | | hCD122 | |
| [symbol] 512 | DNA577 | Knob: | |
| | | hFc(N297, | |
| | | I253A)- | |
| | | hIL2(R38A, | |
| | | F42A, Y45A, | |
| | | E62A, C125A) | |
| [symbol] 512 | DNA625 | Hole: | |
| | | hFc(N297A, | |
| | | I253A) | |
| [symbol] 513 | DNA604 | Knob: IgG4 | |
| | | hFc- | |
| | | hIL2(R38A, | |
| | | F42A, Y45A, | |
| | | E62A, C125A) | |
| [symbol] 513 | DNA626 | Hole: | |
| | | hFcIgG4 | |
| [symbol] 526 | DNA670 | Knob: hFc- | |
| | | hIL2(R38A | |
| | | F42A, Y45A, | |
| | | E62A, C125A) | |
| [symbol] 526 | DNA672 | Hole: hFc- | GSGGG |
| | | [VPLSLY]- | |
| | | hCD122 | |
| [symbol] 530 | DNA255 | Knob: | |
| | | hFc(N297A)- | |
| | | hIL2(R38A, | |
| | | F42A, Y45A, | |
| | | E62A, C125A) | |
| [symbol] 530 | DNA612 | Hole: | SGGG |
| | | hFc(N297A)- | |
| | | [MPYDLYHP]- | |
| | | hCD122(C122S, | |
| | | C168S) | |
| [symbol] 531 | DNA255 | Knob: | |
| | | hFc(N297A)- | |
| | | hIL2(R38A, | |
| | | F42A, Y45A, | |
| | | E62A, C125A) | |
| [symbol] 531 | DNA614 | Hole: | SGGG |
| | | hFc(N297A)- | |
| | | [DSGGFMLT]- | |
| | | hCD122(C122S, | |
| | | C168S) | |
| [symbol] 532 | DNA669 | Hole: hFc- | |
| | | hCD122 | |
| [symbol] 532 | DNA671 | Knob: hFc- | SGP |
| | | [VPLSLY]- | |
| | | hIL2(R38A, | |
| | | F42A, Y45A, | |
| | | E62A, C125A) | |
| | | Component5 | |
| | [symbol] olecule | Sequence | FullSequence |
| | [symbol] 368 | | DKTHTCPPCPAPELLGGPSVFLFPPKPKDTLMISRTPEVTCVVVDVSHEDPEVKFN |
| | | | WYVDGVEVHNAKTKPREEQYASTYRVVSVLTVLHQDWLNGKEYKCKVSNKALP |
| | | | APIEKTISKAKGQPREPQVCTLPPSRDELTKNQVSLSCAVKGFYPSDIAVEWESNG |
| | | | QPENNYKTTPPVLDSDGSFFLVSKLTVDKSRWQQGNVFSCSVMHEALHNHYTQ |
| | | | KSLSLSPGPGSGSAVNGTSQFTCFYNSRANISCVWSQDGALQDTSCQVHAWPDR |
| | | | RRWNQTCELLPVSQASWACNLILGAPDSQKLTTVDIVTLRVLCREGVRWRVMAI |
| | | | QDFKPFENLRLMAPISLQVVHVETHRCNISWEISQASHYFERHLEFEARTLSPGHT |
| | | | WEEAPLLTLKQKQEWICLETLTPDTQYEFQVRVKPLQGEFTTWSPWSQPLAFRT |
| | | | KPAALGKD |
| | [symbol] 368 | APTSSSTKKTQL | DKTHTCPPCPAPELLGGPSVFLFPPKPKDTLMISRTPEVTCVVVDVSHEDPEVKFN |
| | | QLEHLLLDLQMI | WYVDGVEVHNAKTKPREEQYASTYRVVSVLTVLHQDWLNGKEYKCKVSNKALP |
| | | LNGINNYKNPKL | APIEKTISKAKGQPREPQVYTLPPCRDELTKNQVSLWCLVKGFYPSDIAVEWESN |
| | | TRMLTSKFYMP | GQPENNYKTTPPVLDSDGSFFLYSKLTVDKSRWQQGNVFSCSVMHEALHNHYT |
| | | KKATELKHLQCL | QKSLSLSPGGNPMGSDPVNFKLLRVVNGGPAPTSSSTKKTQLQLEHLLLDLQMIL |
| | | EESLKPLEEVLNL | NGINNYKNPKLTRMLTSKFYMPKKATELKHLQCLEESLKPLEEVLNLAQSKNFHLR |
| | | AQSKNFHLRPR | PRDLISNINVIVLELKGSETTFMCEYADETATIVEFLNRWITFAQSIISTLT |
| | | DLISNINVIVLEL | |
| | | KGSETTFMCEY | |
| | | ADETATIVEFLN | |
| | | RWITFAQSIISTL | |
| | | T | |
| | [symbol] 375 | | TIKPCPPCKCPAPNAAGGPSVFIFPPKIKDVLMISLSPIVTCVVVDVSEDDPDVQIS |
| | | | WFVNNVEVHTAQTQTHREDYNSTLRVVSALPIQHQDWMSGKEFKCKVNNKDL |
| | | | GAPIERTISKPKGSVRAPQVYVLPPCEEEMTKKQVTLWCMVTDFMPEDIYVEWT |
| | | | NNGKTELNYKNTEPVLDSDGSYFMYSKLRVEKKNWVERNSYSCSVVHEGLHNH |
| | | | HTTKSFSRTPGGGSSPPGGGSSGGGSGPAPTSSSTKKTQLQLEHLLLDLQMILNGI |
| | | | NNYKNPKLTAMLTAKFAMPKKATELKHLQCLEEALKPLEEVLNLAQSKNFHLRPR |
| | | | DLISNINVIVLELKGSETTFMCEYADETATIVEFLNRWITFAQSIISTLT |
| | [symbol] 375 | | TIKPCPPCKCPAPNAAGGPSVFIFPPKIKDVLMISLSPIVTCVVVDVSEDDPDVQIS |
| | | | WFVNNVEVHTAQTQTHREDYNSTLRVVSALPIQHQDWMSGKEFKCKVNNKDL |
| | | | GAPIERTISKPKGSVRAPQVCVLPPPEEEMTKKQVTLSCAVTDFMPEDIYVEWTN |
| | | | NGKTELNYKNTEPVLDSDGSYFMVSKLRVEKKNWVERNSYSCSVVHEGLHNHHT |
| | | | TKSFSRTPG |
| | [symbol] 376 | APTSSSTKKTQL | TIKCPPCKCPAPNAAGGPSVFIFPPKIKDVLMISLSPIVTCVVVDVSEDDPDVQIS |
| | | QLEHLLLDLQMI | WFVNNVEVHTAQTQTHREDYNSTLRVVSALPIQHQDWMSGKEFKCKVNNKDL |
| | | LNGINNYKNPKL | GAPIERTISKPKGSVRAPQVYVLPPCEEEMTKKQVTLWCMVTDFMPEDIYVEWT |
| | | TAMLTAKFAMP | NNGKTELNYKNTEPVLDSDGSYFMYSKLRVEKKNWVERNSYSCSVVHEGLHNH |
| | | KKATELKHLQCL | HTTKSFSRTPGGSPGVPLSLYSGPAPTSSSTKKTQLQLEHLLLDLQMILNGINNYKN |
| | | EEALKPLEEVLN | PKLTAMLTAKFAMPKKATELKHLQCLEEALKPLEEVLNLAQSKNFHLRPRDLISNI |
| | | LAQSKNFHLRPR | NVIVLELKGSETTFMCEYADETATIVEFLNRWITFAQSIISTLT |
| | | DLISNINVIVLEL | |
| | | KGSETTFMCEY | |
| | | ADETATIVEFLN | |
| | | RWITFAQSIISTL | |
| | | T | |
| | [symbol] 376 | | TIKPCPPCKCPAPNAAGGPSVFIFPPKIKDVLMISLSPIVTCVVVDVSEDDPDVQIS |
| | | | WFVNNVEVHTAQTQTHREDYNSTLRVVSALPIQHQDWMSGKEFKCKVNNKDL |
| | | | GAPIERTISKPKGSVRAPQVCVLPPPEEEMTKKQVTLSCAVTDFMPEDIYVEWTN |
| | | | NGKTELNYKNTEPVLDSDGSYFMVSKLRVEKKNWVERNSYSCSVVHEGLHNHHT |
| | | | TKSFSRTPG |
| | [symbol] 377 | | TIKPCPPCKCPAPNAAGGPSVFIFPPKIKDVLMISLSPIVTCVVVDVSEDDPDVQIS |
| | | | WFVNNVEVHTAQTQTHREDYNSTLRVVSALPIQHQDWMSGKEFKCKVNNKDL |
| | | | GAPIERTISKPKGSVRAPQVYVLPPCEEEMTKKQVTLWCMVTDFMPEDIYVEWT |
| | | | NNGKTELNYKNTEPVLDSDGSYFMYSKLRVEKKNWVERNSYSCSVVHEGLHNH |
| | | | HTTKSFSRTPGGGSSPPGGGSSGGGSGPAPTSSSTKKTQLQLEHLLLDLQMILNGI |
| | | | NNYKNPKLTAMLTAKFAMPKKATELKHLQCLEEALKPLEEVLNLAQSKNFHLRPR |
| | | | DLISNINVIVLELKGSETTFMCEYADETATIVEFLNRWITFAQSIISTLT |
| | [symbol] 377 | | TIKPCPPCKCPAPNAAGGPSVFIFPPKIKDVLMISLSPIVTCVVVDVSEDDPDVQIS |
| | | | WFVNNVEVHTAQTQTHREDYNSTLRVVSALPIQHQDWMSGKEFKCKVNNKDL |
| | | | GAPIERTISKPKGSVRAPQVCVLPPPEEEMTKKQVTLSCAVTDFMPEDIYVEWTN |
| | | | NGKTELNYKNTEPVLDSDGSYFMVSKLRVEKKNWVERNSYSCSVVHEGLHNHHT |
| | | | TKSFSRTPGPGSGSAVNGTSQFTCFYNSRANISCVWSQDGALQDTSCQVHAWP |
| | | | DRRRWNQTCELLPVSQASWACNLILGAPDSQKLTTVDIVTLRVLCREGVRWRV |
| | | | MAIQDFKPFENLRLMAPISLQVVHVETHRCNISWEISQASHYFERHLEFEARTLSP |
| | | | GHTWEEAPLLTLKQKQEWICLETLTPDTQYEFQVRVKPLQGEFTTWSPWSQPLA |
| | | | FRTKPAALGKD |
| | [symbol] 378 | APTSSSTKKTQL | TIKPCPPCKCPAPNAAGGPSVFIFPPKIKDVLMISLSPIVTCVVVDVSEDDPDVQIS |
| | | QLEHLLLDLQMI | WFVNNVEVHTAQTQTHREDYNSTLRVVSALPIQHQDWMSGKEFKCKVNNKDL |
| | | LNGINNYKNPKL | GAPIERTISKPKGSVRAPQVYVLPPCEEEMTKKQVTLWCMVTDFMPEDIYVEWT |
| | | TAMLTAKFAMP | NNGKTELNYKNTEPVLDSDGSYFMYSKLRVEKKNWVERNSYSCSVVHEGLHNH |
| | | KKATELKHLQCL | HTTKSFSRTPGGSPGVPLSLYSGPAPTSSSTKKTQLQLEHLLLDLQMILNGINNYKN |
| | | EEALKPLEEVLN | PKLTAMLTAKFAMPKKATELKHLQCLEEALKPLEEVLNLAQSKNFHLRPRDLISNI |
| | | LAQSKNFHLRPR | NVIVLELKGSETTFMCEYADETATIVEFLNRWITFAQSIISTLT |
| | | DLISNINVIVLEL | |
| | | KGSETTFMCEY | |
| | | ADETATIVEFLN | |
| | | RWITFAQSIISTL | |
| | | T | |
| | | | TIKPCPPCKCPAPNAAGGPSVFIFPPKIKDVLMISLSPIVTCVVVDVSEDDPDVQIS |
| | [symbol] 378 | | WFVNNVEVHTAQTQTHREDYNSTLRVVSALPIQHQDWMSGKEFKCKVNNKDL |
| | | | GAPIERTISKPKGSVRAPQVCVLPPPEEEMTKKQVTLSCAVTDFMPEDIYVEWTN |
| | | | NGKTELNYKNTEPVLDSDGSYFMVSKLRVEKKNWVERNSYSCSVVHEGLHNHHT |
| | | | TKSFSRTPGPGSGSAVNGTSQFTCFYNSRANISCVWSQDGALQDTSCQVHAWP |
| | | | DRRRWNQTCELLPVSQASWACNLILGAPDSQKLTTVDIVTLRVLCREGVRWRV |
| | | | MAIQDFKPFENLRLMAPISLQVVHVETHRCNISWEISQASHYFERHLEFEARTLSP |
| | | | GHTWEEAPLLTLKQKQEWICLETLTPDTQYEFQVRVKPLQGEFTTWSPWSQPLA |
| | | | FRTKPAALGKD |
| | [symbol] 397 | | DKTHTCPPCPAPELLGGPSVFLFPPKPKDTLMISRTPEVTCVVVDVSHEDPEVKFN |
| | | | WYVDGVEVHNAKTKPREEQYASTYRVVSVLTVLHQDWLNGKEYKCKVSNKALP |
| | | | APIEKTISKAKGQPREPQVCTLPPSRDELTKNQVSLSCAVKGFYPSDIAVEWESNG |
| | | | QPENNYKTTPPVLDSDGSFFLVSKLTVDKSRWQQGNVFSCSVMHEALHNHYTQ |
| | | | KSLSLSPG |
| | [symbol] 397 | APTSSSTKKTQL | DKTHTCPPCPAPELLGGPSVFLFPPKPKDTLMISRTPEVTCVVVDVSHEDPEVKFN |
| | | QLEHLLLDLQMI | WYVDGVEVHNAKTKPREEQYASTYRVVSVLTVLHQDWLNGKEYKCKVSNKALP |
| | | LNGINNYKNPKL | APIEKTISKAKGQPREPQVYTLPPCRDELTKNQVSLWCLVKGFYPSDIAVEWESN |
| | | TRMLTFKFYMP | GQPENNYKTTPPVLDSDGSFFLYSKLTVDKSRWQQGNVFSCSVMHEALHNHYT |
| | | KKATELKHLQCL | QKSLSLSPGGSGPDSGGFMLTSGPAPTSSSTKKTQLQLEHLLLDLQMILNGINNYK |
| | | EEELKPLEEVLN | NPKLTRMLTFKFYMPKKATELKHLQCLEEELKPLEEVLNLAQSKNFHLRPRDLISNI |
| | | LAQSKNFHLRPR | NVIVLELKGSETTFMCEYADETATIVEFLNRWITFAQSIISTLT |
| | | DLISNINVIVLEL | |
| | | KGSETTFMCEY | |
| | | ADETATIVEFLN | |
| | | RWITFAQSIISTL | |
| | | T | |
| | [symbol] 429 | | TIKPCPPCKCPAPNAAGGPSVFIFPPKIKDVLMISLSPIVTCVVVDVSEDDPDVQIS |
| | | | WFVNNVEVHTAQTQTHREDYNSTLRVVSALPIQHQDWMSGKEFKCKVNNKDL |
| | | | GAPIERTISKPKGSVRAPQVYVLPPCEEEMTKKQVTLWCMVTDFMPEDIYVEWT |
| | | | NNGKTELNYKNTEPVLDSDGSYFMYSKLRVEKKNWVERNSYSCSVVHEGLHNH |
| | | | HTTKSFSRTPGGGSSPPGGGSSGGGSGPAPTSSSTKKTQLQLEHLLLDLQMILNGI |
| | | | NNYKNPKLTAMLTAKFAMPKKATELKHLQCLEEALKPLEEVLNLAQSKNFHLRPR |
| | | | DLISNINVIVLELKGSETTFMCEYADETATIVEFLNRWITFAQSIISTLT |
| | [symbol] 429 | | TIKPCPPCKCPAPNAAGGPSVFIFPPKIKDVLMISLSPIVTCVVVDVSEDDPDVQIS |
| | | | WFVNNVEVHTAQTQTHREDYNSTLRVVSALPIQHQDWMSGKEFKCKVNNKDL |
| | | | GAPIERTISKPKGSVRAPQVCVLPPPEEEMTKKQVTLSCAVTDFMPEDIYVEWTN |
| | | | NGKTELNYKNTEPVLDSDGSYFMVSKLRVEKKNWVERNSYSCSVVHEGLHNHHT |
| | | | TKSFSRTPGHHHHHHHH |
| | [symbol] 430 | | TIKPCPPCKCPAPNAAGGPSVFIFPPKIKDVLMISLSPIVTCVVVDVSEDDPDVQIS |
| | | | WFVNNVEVHTAQTQTHREDYNSTLRVVSALPIQHQDWMSGKEFKCKVNNKDL |
| | | | GAPIERTISKPKGSVRAPQVYVLPPCEEEMTKKQVTLWCMVTDFMPEDIYVEWT |
| | | | NNGKTELNYKNTEPVLDSDGSYFMYSKLRVEKKNWVERNSYSCSVVHEGLHNH |
| | | | HTTKSFSRTPGGGSSPPGGGSSGGGSGPAPTSSSTKKTQLQLEHLLLDLQMILNGI |
| | | | NNYKNPKLTAMLTAKFAMPKKATELKHLQCLEEALKPLEEVLNLAQSKNFHLRPR |
| | | | DLISNINVIVLELKGSETTFMCEYADETATIVEFLNRWITFAQSIISTLT |
| | [symbol] 430 | | TIKPCPPCKCPAPNAAGGPSVFIFPPKIKDVLMISLSPIVTCVVVDVSEDDPDVQIS |
| | | | WFVNNVEVHTAQTQTHREDYNSTLRVVSALPIQHQDWMSGKEFKCKVNNKDL |
| | | | GAPIERTISKPKGSVRAPQVCVLPPPEEEMTKKQVTLSCAVTDFMPEDIYVEWTN |
| | | | NGKTELNYKNTEPVLDSDGSYFMVSKLRVEKKNWVERNSYSCSVVHEGLHNHHT |
| | | | TKSFSRTPGPGSGSAVNGTSQFTCFYNSRANISCVWSQDGALQDTSCQVHAWP |
| | | | DRRRWNQTCELLPVSQASWACNLILGAPDSQKLTTVDIVTLRVLCREGVRWRV |
| | | | MAIQDFKPFENLRLMAPISLQVVHVETHRCNISWEISQASHYFERHLEFEARTLSP |
| | | | GHTWEEAPLLTLKQKQEWICLETLTPDTQYEFQVRVKPLQGEFTTWSPWSQPLA |
| | | | FRTKPAALGKDGHHHHHHHH |
| | [symbol] 431 | | TIKPCPPCKCPAPNAAGGPSVFIFPPKIKDVLMISLSPIVTCVVVDVSEDDPDVQIS |
| | | | WFVNNVEVHTAQTQTHREDYNSTLRVVSALPIQHQDWMSGKEFKCKVNNKDL |
| | | | GAPIERTISKPKGSVRAPQVYVLPPCEEEMTKKQVTLWCMVTDFMPEDIYVEWT |
| | | | NNGKTELNYKNTEPVLDSDGSYFMYSKLRVEKKNWVERNSYSCSVVHEGLHNH |
| | | | HTTKSFSRTPGGGSSPPGGGSSGGGSGPAPTSSSTKKTQLQLEHLLLDLQMILNGI |
| | | | NNYKNPKLTAMLTAKFAMPKKATELKHLQCLEEALKPLEEVLN LAQSKNFHLRPR |
| | | | DLISNINVIVLELKGSETTFMCEYADETATIVEFLNRWITFAQSIISTLT |
| | [symbol] 431 | | TIKPCPPCKCPAPNAAGGPSVFIFPPKIKDVLMISLSPIVTCVVVDVSEDDPDVQIS |
| | | | WFVNNVEVHTAQTQTHREDYNSTLRVVSALPIQHQDWMSGKEFKCKVNNKDL |
| | | | GAPIERTISKPKGSVRAPQVCVLPPPEEEMTKKQVTLSCAVTDFMPEDIYVEWTN |
| | | | NGKTELNYKNTEPVLDSDGSYFMVSKLRVEKKNWVERNSYSCSVVHEGLHNHHT |
| | | | TKSFSRTPGPGSGSAVKNCSHLECFYNSRANVSCMWSHEEALNVTTCHVHAKSN |
| | | | LRHWNKTCELTLVRQASWACNLILGSFPESQSLTSVDLLDINVVCWEEKGWRRV |
| | | | KTCDFHPFDNLRLVAPHSLQVLHIDTQRCNISWKVSQVSHYIEPYLEFEARRRLLG |
| | | | HSWEDASVLSLKQRQQWLFLEMLIPSTSYEVQVRVKAQRNNTGTWSPWSQPLT |
| | | | FRTRPADPMKEGHHHHHHHH |
| | [symbol] 432 | APTSSSTKKTQL | TIKPCPPCKCPAPNAAGGPSVFIFPPKIKDVLMISLSPIVTCVVVDVSEDDPDVQIS |
| | | QLEHLLLDLQMI | WFVNNVEVHTAQTQTHREDYNSTLRVVSALPIQHQDWMSGKEFKCKVNNKDL |
| | | LNGINNYKNPKL | GAPIERTISKPKGSVRAPQVYVLPPCEEEMTKKQVTLWCMVTDFMPEDIYVEWT |
| | | TAMLTAKFAMP | NNGKTELNYKNTEPVLDSDGSYFMYSKLRVEKKNWVERNSYSCSVVHEGLHNH |
| | | KKATELKHLQCL | HTTKSFSRTPGGSPGVPLSLYSGPAPTSSSTKKTQLQLEHLLLDLQMILNGINNYKN |
| | | EEALKPLEEVLN | PKLTAMLTAKFAMPKKATELKHLQCLEEALKPLEEVLNLAQSKNFHLRPRDLISNI |
| | | LAQSKNFHLRPR | NVIVLELKGSETTFMCEYADETATIVEFLNRWITFAQSIISTLT |
| | | DLISNINVIVEL | |
| | | KGSETTFMCEY | |
| | | ADETATIVEFLN | |
| | | RWITFAWSIISTL | |
| | | T | |
| | [symbol] 432 | | TIKPCPPCKCPAPNAAGGPSVFIFPPKIKDVLMISLSPIVTCVVVDVSEDDPDVQIS |
| | | | WFVNNVEVHTAQTQTHREDYNSTLRVVSALPIQHQDWMSGKEFKCKVNNKDL |
| | | | GAPIERTISKPKGSVRAPQVCVLPPPEEEMTKKQVTLSCAVTDFMPEDIYVEWTN |
| | | | NGKTELNYKNTEPVLDSDGSYFMVSKLRVEKKNWVERNSYSCSVVHEGLHNHHT |
| | | | TKSFSRTPGPGSGSAVNGTSQFTCFYNSRANISCVWSQDGALQDTSCQVHAWP |
| | | | DRRRWNQTCELLPVSQASWACNLILGAPDSQKLTTVDIVTLRVLCREGVRWRV |
| | | | MAIQDFKPFENLRLMAPISLQVVHVETHRCNISWEISQASHYFERHLEFEARTLSP |
| | | | GHTWEEAPLLTLKQKQEWICLETLTPDTQYEFQVRVKPLQGEFTTWSPWSQPLA |
| | | | FRTKPAALGKDGHHHHHHHH |
| | [symbol] 433 | APTSSSTKKTQL | TIKPCPPCKCPAPNAAGGPSVFIFPPKIKDVLMISLSPIVTCVVVDVSEDDPDVQIS |
| | | QLEHLLLDLQMI | WFVNNVEVHTAQTQTHREDYNSTLRVVSALPIQHQDWMSGKEFKCKVNNKDL |
| | | LNGINNYKNPKL | GAPIERTISKPKGSVRAPQVYVLPPCEEEMTKKQVTLWCMVTDFMPEDIYVEWT |
| | | TAMLTAKFAMP | NNGKTELNYKNTEPVLDSDGSYFMYSKLRVEKKNWVERNSYSCSVVHEGLHNH |
| | | KKATELKHLQCL | HTTKSFSRTPGGSPGVPLSLYSGPAPTSSSTKKTQLQLEHLLLDLQMILNGINNYKN |
| | | EEALKPLEEVLN | PKLTAMLTAKFAMPKKATELKHLQCLEEALKPLEEVLNLAQSKNFHLRPRDLISNI |
| | | LAQSKNFHLRPR | NVIVLELKGSETTFMCEYADETATIVEFLNRWITFAQSIISTLT |
| | | DLISNINVIVEL | |
| | | KGSETTFMCEY | |
| | | ADETATIVEFLN | |
| | | RWITFAWSIISTL | |
| | | T | |
| | [symbol] 433 | | TIKPCPPCKCPAPNAAGGPSVFIFPPKIKDVLMISLSPIVTCVVVDVSEDDPDVQIS |
| | | | WFVNNVEVHTAQTQTHREDYNSTLRVVSALPIQHQDWMSGKEFKCKVNNKDL |
| | | | GAPIERTISKPKGSVRAPQVCVLPPPEEEMTKKQVTLSCAVTDFMPEDIYVEWTN |
| | | | NGKTELNYKNTEPVLDSDGSYFMVSKLRVEKKNWVERNSYSCSVVHEGLHNHHT |
| | | | TKSFSRTPGPGSGSAVKNCSHLECFYNSRANVSCMWSHEEALNVTTCHVHAKSN |
| | | | LRHWNKTCELTLVRQASWACNLILGSFPESQSLTSVDLLDINVVCWEEKGWRRV |
| | | | KTCDFHPFDNLRLVAPHSLQVLHIDTQRCNISWKVSQVSHYIEPYLEFEARRRLLG |
| | | | HSWEDASVLSLKQRQQWLFLEMLIPSTSYEVQVRVKAQRNNTGTWSPWSQPLT |
| | | | FRTRPADPMKEGHHHHHHHH |
| | [symbol] 435 | APTSSSTKKTQL | DKTHTCPPCPAPELLGGPSVFLFPPKPKDTLMISRTPEVTCVVVDVSHEDPEVKFN |
| | | QLEHLLLDLQMI | WYVDGVEVHNAKTKPREEQYASTYRVVSVLTVLHQDWLNGKEYKCKVSNKALP |
| | | LNGINNYKNPKL | APIEKTISKAKGQPREPQVYTLPPCRDELTKNQVSLWCLVKGFYPSDIAVEWESN |
| | | TAMLTAKFAMP | GQPENNYKTTPPVLDSDGSFFLYSKLTVDKSRWQQGNVFSCSVMHEALHNHYT |
| | | KKATELKHLQCL | QKSLSLSPGGSPGVPLSLYSGPAPTSSSTKKTQLQLEHLLLDLQMILNGINNYKNPK |
| | | EEALKPLEEVLN | LTAMLTAKFAMPKKATELKHLQCLEEALKPLEEVLNLAQSKNFHLRPRDLISNINVI |
| | | LAQSKNFHLRPR | VLELKGSETTFMCEYADETATIVEFLNRWITFAQSIISTLT |
| | | DLISNINVIVLEL | |
| | | KGSETTFMCEY | |
| | | ADETATIVEFLN | |
| | | RWITFAQSIISTL | |
| | | T | |
| | [symbol] 435 | AVNGTSQFTCF | EVQLLESGGGLVQPGGSLRLSCAASGFTFSLFTMSVVVRQAPGKGLEVVVSAISGS |
| | | YNSRANISCVW | GGSTYYADSVKGRFTISRDNSKNTLYLQMNSLRAEDTAVYYCAKSTHLYLFDYWG |
| | | SQDGALQDTSC | QGTLVTVSSGGGGSGGGGSGGGGSEIVLTQSPGTLSLSPGERATLSCRASQSVSM |
| | | QVHAWPDRRR | PFLAWYQQKPGQAPRLLIYGASSRATGIPDRFSGSGSGTDFTLTISRLEPEDFAVYY |
| | | WNQTCELLPVS | CQQMRGRPPTFGQGTKVEIKGGSDKTHTCPPCPAPELLGGPSVFLFPPKPKDTL |
| | | QASWACNLILG | MISRTPEVTCVVVDVSHEDPEVKFNWYVDGVEVHNAKTKPREEQYASTYRVVSV |
| | | APDSQKLTTVDI | LTVLHQDWLNGKEYKCKVSNKALPAPIEKTISKAKGQPREPQVCTLPPSRDELTKN |
| | | VTLRVLCREGVR | QVSLSCAVKGFYPSDIAVEWESNGQPENNYKTTPPVLDSDGSFFLVSKLTVDKSR |
| | | WRVMAIQDFK | WQQGNVFSCSVMHEALHNHYTQKSLSLSPGPGSGSAVNGTSQFTCFYNSRANIS |
| | | PFENLRLMAPIS | CVWSQDGALQDTSCQVHAWPDRRRWNQTCELLPVSQASWACNLILGAPDSQ |
| | | LQVVHVETHRC | KLTTVDIVTLRVLCREGVRWRVMAIQDFKPFENLRLMAPISLQVVHVETHRCNIS |
| | | NISWEISQASHY | WEISQASHYFERHLEFEARTLSPGHTWEEAPLLTLKQKQEWICLETLTPDTQYEFQ |
| | | FERHLEFEARTL | VRVKPLQGEFTTWSPWSQPLAFRTKPAALGKD |
| | | SPGHTWEEAPL | |
| | | LTLKQKQEWICL | |
| | | ETLTPDTQYEFQ | |
| | | VRVKPLQGEFTT | |
| | | WSPWSQPLAFR | |
| | | TKPAALGKD | |
| | [symbol] 436 | | DKTHTCPPCPAPELLGGPSVFLFPPKPKDTLMISRTPEVTCVVVDVSHEDPEVKFN |
| | | | WYVDGVEVHNAKTKPREEQYASTYRVVSVLTVLHQDWLNGKEYKCKVSNKALP |
| | | | APIEKTISKAKGQPREPQVCTLPPSRDELTKNQVSLSCAVKGFYPSDIAVEWESNG |
| | | | QPENNYKTTPPVLDSDGSFFLVSKLTVDKSRWQQGNVFSCSVMHEALHNHYTQ |
| | | | KSLSLSPGPGSGSAVNGTSQFTCFYNSRANISCVWSQDGALQDTSCQVHAWPDR |
| | | | RRWNQTCELLPVSQASWACNLILGAPDSQKLTTVDIVTLRVLCREGVRWRVMAI |
| | | | QDFKPFENLRLMAPISLQVVHVETHRCNISWEISQASHYFERHLEFEARTLSPGHT |
| | | | WEEAPLLTLKQKQEWICLETLTPDTQYEFQVRVKPLQGEFTTWSPWSQPLAFRT |
| | | | KPAALGKD |
| | [symbol] 436 | | DKTHTCPPCPAPELLGGPSVFLFPPKPKDTLMISRTPEVTCVVVDVSHEDPEVKFN |
| | | | WYVDGVEVHNAKTKPREEQYASTYRVVSVLTVLHQDWLNGKEYKCKVSNKALP |
| | | | APIEKTISKAKGQPREPQVYTLPPCRDELTKNQVSLWCLVKGFYPSDIAVEWESN |
| | | | GQPENNYKTTPPVLDSDGSFFLYSKLTVDKSRWQQGNVFSCSVMHEALHNHYT |
| | | | QKSLSLSPGGISSGLLSGRSDQPSGPAPTSSSTKKTQLQLEHLLLDLQMILNGINNY |
| | | | KNPKLTAMLTAKFAMPKKATELKHLQCLEEALKPLEEVLNLAQSKNFHLRPRDLIS |
| | | | NINVIVLELKGSETTFMCEYADETATIVEFLNRWITFAQSIISTLT |
| | [symbol] 437 | | DKTHTCPPCPAPELLGGPSVFLFPPKPKDTLMISRTPEVTCVVVDVSHEDPEVKFN |
| | | | WYVDGVEVHNAKTKPREEQYASTYRVVSVLTVLHQDWLNGKEYKCKVSNKALP |
| | | | APIEKTISKAKGQPREPQVCTLPPSRDELTKNQVSLSCAVKGFYPSDIAVEWESNG |
| | | | QPENNYKTTPPVLDSDGSFFLVSKLTVDKSRWQQGNVFSCSVMHEALHNHYTQ |
| | | | KSLSLSPGPGSGSAVNGTSQFTCFYNSRANISCVWSQDGALQDTSCQVHAWPDR |
| | | | RRWNQTCELLPVSQASWACNLILGAPDSQKLTTVDIVTLRVLCREGVRWRVMAI |
| | | | QDFKPFENLRLMAPISLQVVHVETHRCNISWEISQASHYFERHLEFEARTLSPGHT |
| | | | WEEAPLLTLKQKQEWICLETLTPDTQYEFQVRVKPLQGEFTTWSPWSQPLAFRT |
| | | | KPAALGKD |
| | [symbol] 437 | | DKTHTCPPCPAPELLGGPSVFLFPPKPKDTLMISRTPEVTCVVVDVSHEDPEVKFN |
| | | | WYVDGVEVHNAKTKPREEQYASTYRVVSVLTVLHQDWLNGKEYKCKVSNKALP |
| | | | APIEKTISKAKGQPREPQVYTLPPCRDELTKNQVSLWCLVKGFYPSDIAVEWESN |
| | | | GQPENNYKTTPPVLDSDGSFFLYSKLTVDKSRWQQGNVFSCSVMHEALHNHYT |
| | | | QKSLSLSPGGISSGLLSGRSSGPAPTSSSTKKTQLQLEHLLLDLQMILNGINNYKNP |
| | | | KLTAMLTAKFAMPKKATELKHLQCLEEALKPLEEVLNLAQSKNFHLRPRDLISNIN |
| | | | VIVLELKGSETTFMCEYADETATIVEFLNRWITFAQSIISTLT |
| | [symbol] 438 | | DKTHTCPPCPAPELLGGPSVFLFPPKPKDTLMISRTPEVTCVVVDVSHEDPEVKFN |
| | | | WYVDGVEVHNAKTKPREEQYASTYRVVSVLTVLHQDWLNGKEYKCKVSNKALP |
| | | | APIEKTISKAKGQPREPQVYTLPPCRDELTKNQVSLWCLVKGFYPSDIAVEWESN |
| | | | GQPENNYKTTPPVLDSDGSFFLYSKLTVDKSRWQQGNVFSCSVMHEALHNHYT |
| | | | QKSLSLSPGGGSSPPGGGSSGGGSGPAPTSSSTKKTQLQLEHLLLDLQMILNGINN |
| | | | YKNPKLTAMLTAKFAMPKKATELKHLQCLEEALKPLEEVLNLAQSKNFHLRPRDLI |
| | | | SNINVIVLELKGSETTFMCEYADETATIVEFLNRWITFAQSIISTLT |
| | [symbol] 438 | AVNGTSQFTCF | DKTHTCPPCPAPELLGGPSVFLFPPKPKDTLMISRTPEVTCVVVDVSHEDPEVKFN |
| | | YNSRANISCVW | WYVDGVEVHNAKTKPREEQYASTYRVVSVLTVLHQDWLNGKEYKCKVSNKALP |
| | | SQDGALQDTSC | APIEKTISKAKGQPREPQVCTLPPSRDELTKNQVSLSCAVKGFYPSDIAVEWESNG |
| | | QVHAWPDRRR | QPENNYKTTPPVLDSDGSFFLVSKLTVDKSRWQQGNVFSCSVMHEALHNHYTQ |
| | | WNQTCELLPVS | KSLSLSPGGPPSGSSPGVPLSLYGSGGGAVNGTSQFTCFYNSRANISCVWSQDGA |
| | | QASWACNLILG | LQDTSCQVHAWPDRRRWNQTCELLPVSQASWACNLILGAPDSQKLTTVDIVTL |
| | | APDSQKLTTVDI | RVLCREGVRWRVMAIQDFKPFENLRLMAPISLQVVHVETHRCNISWEISQASHY |
| | | VTLRVLCREGVR | FERHLEFEARTLSPGHTWEEAPLLTLKQKQEWICLETLTPDTQYEFQVRVKPLQG |
| | | WRVMAIQDFK | EFTTWSPWSQPLAFRTKPAALGKD |
| | | PFENLRLMAPIS | |
| | | LQVVHVETHRC | |
| | | NISWEISQASHY | |
| | | FERHLEFEARTL | |
| | | SPGHTWEEAPL | |
| | | LTLKQKQEWICL | |
| | | ETLTPDTQYEFQ | |
| | | VRVKPLQGEFTT | |
| | | WSPWSQPLAFR | |
| | | TKPAALGKD | |
| | [symbol] 439 | | DKTHTCPPCPAPELLGGPSVFLFPPKPKDTLMISRTPEVTCVVVDVSHEDPEVKFN |
| | | | WYVDGVEVHNAKTKPREEQYASTYRVVSVLTVLHQDWLNGKEYKCKVSNKALP |
| | | | APIEKTISKAKGQPREPQVCTLPPSRDELTKNQVSLSCAVKGFYPSDIAVEWESNG |
| | | | QPENNYKTTPPVLDSDGSFFLVSKLTVDKSRWQQGNVFSCSVMHEALHNHYTQ |
| | | | KSLSLSPG |
| | [symbol] 439 | APTSSSTKKTQL | DKTHTCPPCPAPELLGGPSVFLFPPKPKDTLMISRTPEVTCVVVDVSHEDPEVKFN |
| | | QLEHLLLDLQMI | WYVDGVEVHNAKTKPREEQYASTYRVVSVLTVLHQDWLNGKEYKCKVSNKALP |
| | | LNGINNYKNPKL | APIEKTISKAKGQPREPQVYTLPPCRDELTKNQVSLWCLVKGFYPSDIAVEWESN |
| | | TAMLTAKFAMP | GQPENNYKTTPPVLDSDGSFFLYSKLTVDKSRWQQGNVFSCSVMHEALHNHYT |
| | | KKATELKHLQCL | QKSLSLSPGGSPGVPLSLYSGPAPTSSSTKKTQLQLEHLLLDLQMILNGINNYKNPK |
| | | EEALKPLEEVLN | LTAMLTAKFAMPKKATELKHLQCLEEALKPLEEVLNLAQSKNFHFDPRDVVSNIN |
| | | LAQSKNFHFDP | VFVLELKGSETTFMCEYADETATIVEFLNRWITFAQSIISTLT |
| | | RDVVSNINVFVL | |
| | | ELKGSETTFMCE | |
| | | YADETATIVEFL | |
| | | NRWITFAQSIIS | |
| | | TLT | |
| | [symbol] 440 | | DKTHTCPPCPAPELLGGPSVFLFPPKPKDTLMISRTPEVTCVVVDVSHEDPEVKFN |
| | | | WYVDGVEVHNAKTKPREEQYASTYRVVSVLTVLHQDWLNGKEYKCKVSNKALP |
| | | | APIEKTISKAKGQPREPQVCTLPPSRDELTKNQVSLSCAVKGFYPSDIAVEWESNG |
| | | | QPENNYKTTPPVLDSDGSFFLVSKLTVDKSRWQQGNVFSCSVMHEALHNHYTQ |
| | | | KSLSLSPGPGSGSAVNGTSQFTCFYNSRANISCVWSQDGALQDTSCQVHAWPDR |
| | | | RRWNQTCELLPVSQASWACNLILGAPDSQKLTTVDIVTLRVLCREGVRWRVMAI |
| | | | QDFKPFENLRLMAPISLQVVHVETHRCNISWEISQASHYFERHLEFEARTLSPGHT |
| | | | WEEAPLLTLKQKQEWICLETLTPDTQYEFQVRVKPLQGEFTTWSPWSQPLAFRT |
| | | | KPAALGKD |
| | [symbol] 440 | APTSSSTKKTQL | DKTHTCPPCPAPELLGGPSVFLFPPKPKDTLMISRTPEVTCVVVDVSHEDPEVKFN |
| | | QLEHLLLDLQMI | WYVDGVEVHNAKTKPREEQYASTYRVVSVLTVLHQDWLNGKEYKCKVSNKALP |
| | | LNGINNYKNPKL | APIEKTISKAKGQPREPQVYTLPPCRDELTKNQVSLWCLVKGFYPSDIAVEWESN |
| | | TAMLTAKFAMP | GQPENNYKTTPPVLDSDGSFFLYSKLTVDKSRWQQGNVFSCSVMHEALHNHYT |
| | | KKATELKHLQCL | QKSLSLSPGGSPGVPLSLYSGPAPTSSSTKKTQLQLEHLLLDLQMILNGINNYKNPK |
| | | EEALKPLEEVLN | LTAMLTAKFAMPKKATELKHLQCLEEALKPLEEVLNLAQSKNFHFDPRDVVSNIN |
| | | LAQSKNFHFDP | VFVLELKGSETTFMCEYADETATIVEFLNRWITFAQSIISTLT |
| | | RDVVSNINVFVL | |
| | | ELKGSETTFMCE | |
| | | YADETATIVEFL | |
| | | NRWITFAQSIIS | |
| | | TLT | |
| | [symbol] 441 | AVNGTSQFTCF | DKTHTCPPCPAPELLGGPSVFLFPPKPKDTLMISRTPEVTCVVVDVSHEDPEVKFN |
| | | YNSRANISCVW | WYVDGVEVHNAKTKPREEQYASTYRVVSVLTVLHQDWLNGKEYKCKVSNKALP |
| | | SQDGALQDTSC | APIEKTISKAKGQPREPQVCTLPPSRDELTKNQVSLSCAVKGFYPSDIAVEWESNG |
| | | QVHAWPDRRR | QPENNYKTTPPVLDSDGSFFLVSKLTVDKSRWQQGNVFSCSVMHEALHNHYTQ |
| | | WNQTCELLPVS | KSLSLSPGGPPSGSSPGVPLSLYGSGGGAVNGTSQFTCFYNSRANISCVWSQDGA |
| | | QASWACNLILG | LQDTSCQVHAWPDRRRWNQTCELLPVSQASWACNLILGAPDSQKLTTVDIVTL |
| | | APDSQKLTTVDI | RVLCREGVRWRVMAIQDFKPFENLRLMAPISLQVVHVETHRCNISWEISQASHY |
| | | VTLRVLCREGVR | FERHLEFEARTLSPGHTWEEAPLLTLKQKQEWICLETLTPDTQYEFQVRVKPLQG |
| | | WRVMAIQDFK | EFTTWSPWSQPLAFRTKPAALGKD |
| | | PFENLRLMAPIS | |
| | | LQVVHVETHRC | |
| | | NISWEISQASHY | |
| | | FERHLEFEARTL | |
| | | SPGHTWEEAPL | |
| | | LTLKQKQEWICL | |
| | | ETLTPDTQYEFQ | |
| | | VRVKPLQGEFTT | |
| | | WSPWSQPLAFR | |
| | | TKPAALGKD | |
| | [symbol] 441 | | DKTHTCPPCPAPELLGGPSVFLFPPKPKDTLMISRTPEVTCVVVDVSHEDPEVKFN |
| | | | WYVDGVEVHNAKTKPREEQYASTYRVVSVLTVLHQDWLNGKEYKCKVSNKALP |
| | | | APIEKTISKAKGQPREPQVYTLPPCRDELTKNQVSLWCLVKGFYPSDIAVEWESN |
| | | | GQPENNYKTTPPVLDSDGSFFLYSKLTVDKSRWQQGNVFSCSVMHEALHNHYT |
| | | | QKSLSLSPGGGSSPPGGGSSGGGSGPAPTSSSTKKTQLQLEHLLLDLQMILNGINN |
| | | | YKNPKLTAMLTAKFAMPKKATELKHLQCLEEALKPLEEVLNLAQSKNFHFDPRDV |
| | | | VSNINVFVLELKGSETTFMCEYADETATIVEFLNRWITFAQSIISTLT |
| | [symbol] 442 | | DKTHTCPPCPAPELLGGPSVFLFPPKPKDTLMISRTPEVTCVVVDVSHEDPEVKFN |
| | | | WYVDGVEVHNAKTKPREEQYASTYRVVSVLTVLHQDWLNGKEYKCKVSNKALP |
| | | | APIEKTISKAKGQPREPQVYTLPPCRDELTKNQVSLWCLVKGFYPSDIAVEWESN |
| | | | GQPENNYKTTPPVLDSDGSFFLYSKLTVDKSRWQQGNVFSCSVMHEALHNHYT |
| | | | QKSLSLSPGGGSSPPGGGSSGGGSGPAPTSSSTKKTQLQLEHLLLDLQMILNGINN |
| | | | YKNPKLTAMLTAKFAMPKKATELKHLQCLEEALKPLEEVLNLAQSKNFHLRPRDLI |
| | | | SNINVIVLELKGSETTFMCEYADETATIVEFLNRWITFAQSIISTLT |
| | [symbol] 442 | AVNGTSQFTCF | DKTHTCPPCPAPELLGGPSVFLFPPKPKDTLMISRTPEVTCVVVDVSHEDPEVKFN |
| | | YNSRANISCVW | WYVDGVEVHNAKTKPREEQYASTYRVVSVLTVLHQDWLNGKEYKCKVSNKALP |
| | | SQDGALQDTSC | APIEKTISKAKGQPREPQVCTLPPSRDELTKNQVSLSCAVKGFYPSDIAVEWESNG |
| | | QVHAWPDRRR | QPENNYKTTPPVLDSDGSFFLVSKLTVDKSRWQQGNVFSCSVMHEALHNHYTQ |
| | | WNQTCELLPVS | KSLSLSPGGPPSGSSPGDSGGFMLTSGGGAVNGTSQFTCFYNSRANISCVWSQD |
| | | QASWACNLILG | GALQDTSCQVHAWPDRRRWNQTCELLPVSQASWACNLILGAPDSQKLTTVDIV |
| | | APDSQKLTTVDI | TLRVLCREGVRWRVMAIQDFKPFENLRLMAPISLQVVHVETHRCNISWEISQAS |
| | | VTLRVLCREGVR | HYFERHLEFEARTLSPGHTWEEAPLLTLKQKQEWICLETLTPDTQYEFQVRVKPL |
| | | WRVMAIQDFK | QGEFTTWSPWSQPLAFRTKPAALGKD |
| | | PFENLRLMAPIS | |
| | | LQVVHVETHRC | |
| | | NISWEISQASHY | |
| | | FERHLEFEARTL | |
| | | SPGHTWEEAPL | |
| | | LTLKQKQEWICL | |
| | | ETLTPDTQYEFQ | |
| | | VRVKPLQGEFTT | |
| | | WSPWSQPLAFR | |
| | | TKPAALGKD | |
| | [symbol] 443 | | DKTHTCPPCPAPELLGGPSVFLFPPKPKDTLMISRTPEVTCVVVDVSHEDPEVKFN |
| | | | WYVDGVEVHNAKTKPREEQYASTYRVVSVLTVLHQDWLNGKEYKCKVSNKALP |
| | | | APIEKTISKAKGQPREPQVCTLPPSRDELTKNQVSLSCAVKGFYPSDIAVEWESNG |
| | | | QPENNYKTTPPVLDSDGSFFLVSKLTVDKSRWQQGNVFSCSVMHEALHNHYTQ |
| | | | KSLSLSPGPGSGSAVNGTSQFTCFYNSRANISCVWSQDGALQDTSCQVHAWPDR |
| | | | RRWNQTCELLPVSQASWACNLILGAPDSQKLTTVDIVTLRVLCREGVRWRVMAI |
| | | | QDFKPFENLRLMAPISLQVVHVETHRCNISWEISQASHYFERHLEFEARTLSPGHT |
| | | | WEEAPLLTLKQKQEWICLETLTPDTQYEFQVRVKPLQGEFTTWSPWSQPLAFRT |
| | | | KPAALGKD |
| | [symbol] 443 | APTSSSTKKTQL | DKTHTCPPCPAPELLGGPSVFLFPPKPKDTLMISRTPEVTCVVVDVSHEDPEVKFN |
| | | QLRHLCLRLQMI | APIEKTISKAKGQPREPQVYTLPPCRDELTKNQVSLWCLVKGFYPSDIAVEWESN |
| | | LNGINNYKNPKL | GQPENNYKTTPPVLDSDGSFFLYSKLTVDKSRWQQGNVFSCSVMHEALHNHYT |
| | | TAMLTAKFAMP | QKSLSLSPGGSPGVPLSLYSGPAPTSSSTKKTQLQLRHLCLRLQMILNGINNYKNPK |
| | | KKATELKHLQCL | LTAMLTAKFAMPKKATELKHLQCLEEALKPLEEVLNLAQSKNFHLRPRDLISNINVI |
| | | EEALKPLEEVLN | VLELKGSETTFMCEYADETATIVEFLNRWITFCQSIISTLT |
| | | LAQSKNFHLRPR | |
| | | DLISNINVIVLEL | |
| | | KGSETTFMCEY | |
| | | ADETATIVEFLN | |
| | | RWITFCQSIISTL | |
| | | T | |
| | [symbol] 444 | APTSSSTKKTQL | DKTHTCPPCPAPELLGGPSVFLFPPKPKDTLMISRTPEVTCVVVDVSHEDPEVKFN |
| | | QLEHLLLDLQMI | WYVDGVEVHNAKTKPREEQYASTYRVVSVLTVLHQDWLNGKEYKCKVSNKALP |
| | | LNGINNYKNPKL | APIEKTISKAKGQPREPQVYTLPPCRDELTKNQVSLWCLVKGFYPSDIAVEWESN |
| | | TAMLTAKFAMP | GQPENNYKTTPPVLDSDGSFFLYSKLTVDKSRWQQGNVFSCSVMHEALHNHYT |
| | | KKATELKHLQCL | QKSLSLSPGGSGPDSGGFMLTSGPAPTSSSTKKTQLQLEHLLLDLOMILNGINNYK |
| | | EEALKPLEEVLN | NPKLTAMLTAKFAMPKKATELKHLQCLEEALKPLEEVLNLAQSKNFHLRPRDLISN |
| | | LAQSKNFHLRPR | INVIVLELKGSETTFMCEYADETATIVEFLNRWITFAQSIISTLT |
| | | DLISNINVIVLEL | |
| | | KGSETTFMCEY | |
| | | ADETATIVEFLN | |
| | | RWITFAQSIISTL | |
| | | T | |
| | [symbol] 444 | | DKTHTCPPCPAPELLGGPSVFLFPPKPKDTLMISRTPEVTCVVVDVSHEDPEVKFN |
| | | | WYVDGVEVHNAKTKPREEQYASTYRVVSVLTVLHQDWLNGKEYKCKVSNKALP |
| | | | APIEKTISKAKGQPREPQVCTLPPSRDELTKNQVSLSCAVKGFYPSDIAVEWESNG |
| | | | QPENNYKTTPPVLDSDGSFFLVSKLTVDKSRWQQGNVFSCSVMHEALHNHYTQ |
| | | | KSLSLSPGPGSGSAVNGTSQFTCFYNSRANISCVWSQDGALQDTSCQVHAWPDR |
| | | | RRWNQTCELLPVSQASWACNLILGAPDSQKLTTVDIVTLRVLCREGVRWRVMAI |
| | | | QDFKPFENLRLMAPISLQVVHVETHRSNISWEISQASHYFERHLEFEARTLSPGHT |
| | | | WEEAPLLTLKQKQEWISLETLTPDTQYEFQVRVKPLQGEFTTWSPWSQPLAFRT |
| | | | K^{p}AALCKD |
| | [symbol] 449 | | EPKSSDKTHTCPPCPAPELLGGPSVFLFPPKPKDTLMISRTPEVTCVVVDVSHEDP |
| | | | EVKFNWYVDGVEVHNAKTKPREEQYASTYRVVSVLTVLHQDWLNGKEYKCKVS |
| | | | NKALPAPIEKTISKAKGQPREPQVCTLPPSRDELTKNQVSLSCAVKGFYPSDIAVE |
| | | | WESNGQPENNYKTTPPVLDSDGSFFLVSKLTVDKSRWQQGNVFSCSVMHEALH |
| | | | NHYTQKSLSLSPGPGSGSAVNGTSQFTCFYNSRANISCVWSQDGALQDTSCQVH |
| | | | AWPDRRRWNQTCELLPVSQASWACNLILGAPDSQKLTTVDIVTLRVLCREGVR |
| | | | WRVMAIQDFKPFENLRLMAPISLQVVHVETHRCNISWEISQASHYFERHLEFEAR |
| | | | TLSPGHTWEEAPLLTLKQKQEWICLETLTPDTQYEFQVRVKPLQGEFTTWSPWS |
| | | | QPLAFRTKPAALGKD |
| | [symbol] 449 | APTSSSTKKTQL | EPKSSDKTHTSPPSPAPELLGGPSVFLFPPKPKDTLMISRTPEVTCVVVDVSHEDP |
| | | QLEHLLLDLQMI | EVKFNWYVDGVEVHNAKTKPREEQYASTYRVVSVLTVLHQDWLNGKEYKCKVS |
| | | LNGINNYKNPKL | NKALPAPIEKTISKAKGQPREPQVYTLPPCRDELTKNQVSLWCLVKGFYPSDIAVE |
| | | TAMLTAKFAMP | WESNGQPENNYKTTPPVLDSDGSFFLYSKLTVDKSRWQQGNVFSCSVMHEALH |
| | | KKATELKHLQCL | NHYTQKSLSLSPGGSPGVPLSLYSGPAPTSSSTKKTQLQLEHLLLDLQMILNGINNY |
| | | EEALKPLEEVLN | KNPKLTAMLTAKFAMPKKATELKHLQCLEEALKPLEEVLNLAQSKNFHLRPRDLIS |
| | | LAQSKNFHLRPR | NINVIVLELKGSETTFMCEYADETATIVEFLNRWITFAQSIISTLT |
| | | DLISNINVIVLEL | |
| | | KGSETTFMCEY | |
| | | ADETATIVEFLN | |
| | | RWITFAQSIISTL | |
| | | T | |
| | [symbol] 450 | | AKTDKTHTCPPCPAPELLGGPSVFLFPPKPKDTLMISRTPEVTCVVVDVSHEDPEV |
| | | | KFNWYVDGVEVHNAKTKPREEQYASTYRVVSVLTVLHQDWLNGKEYKCKVSNK |
| | | | ALPAPIEKTISKAKGQPREPQVCTLPPSRDELTKNQVSLSCAVKGFYPSDIAVEWES |
| | | | NGQPENNYKTTPPVLDSDGSFFLVSKLTVDKSRWQQGNVFSCSVMHEALHNHY |
| | | | TQKSLSLSPGPGSGSAVNGTSQFTCFYNSRANISCVWSQDGALQDTSCQVHAWP |
| | | | DRRRWNQTCELLPVSQASWACNLILGAPDSQKLTTVDIVTLRVLCREGVRWRV |
| | | | MAIQDFKPFENLRLMAPISLQVVHVETHRCNISWEISQASHYFERHLEFEARTLSP |
| | | | GHTWEEAPLLTLKQKQEWICLETLTPDTQYEFQVRVKPLQGEFTTWSPWSQPLA |
| | | | FRTKPAALGKD |
| | [symbol] 450 | APTSSSTKKTQL | AKTDKTHTCPPCPAPELLGGPSVFLFPPKPKDTLMISRTPEVTCVVVDVSHEDPEV |
| | | QLEHLLLDLQMI | KFNWYVDGVEVHNAKTKPREEQYASTYRVVSVLTVLHQDWLNGKEYKCKVSNK |
| | | LNGINNYKNPKL | ALPAPIEKTISKAKGQPREPQVYTLPPCRDELTKNQVSLWCLVKGFYPSDIAVEWE |
| | | TAMLTAKFAMP | SNGQPENNYKTTPPVLDSDGSFFLYSKLTVDKSRWQQGNVFSCSVMHEALHNH |
| | | KKATELKHLQCL | YTQKSLSLSPGGSPGVPLSLYSGPAPTSSSTKKTQLQLEHLLLDLQMILNGINNYKN |
| | | EEALKPLEEVLN | PKLTAMLTAKFAMPKKATELKHLQCLEEALKPLEEVLNLAQSKNFHLRPRDLISNI |
| | | LAQSKNFHLRPR | NVIVLELKGSETTFMCEYADETATIVEFLNRWITFAQSIISTLT |
| | | DLISNINVIVLEL | |
| | | KGSETTFMCEY | |
| | | ADETATIVEFLN | |
| | | RWITFAQSIISTL | |
| | | T | |
| | [symbol] 451 | | AKTEPKSSDKTHTCPPCPAPELLGGPSVFLFPPKPKDTLMISRTPEVTCVVVDVSH |
| | | | EDPEVKFNWYVDGVEVHNAKTKPREEQYASTYRVVSVLTVLHQDWLNGKEYKC |
| | | | KVSNKALPAPIEKTISKAKGQPREPQVCTLPPSRDELTKNQVSLSCAVKGFYPSDIA |
| | | | VEWESNGQPENNYKTTPPVLDSDGSFFLVSKLTVDKSRWQQGNVFSCSVMHEA |
| | | | LHNHYTQKSLSLSPGPGSGSAVNGTSQFTCFYNSRANISCVWSQDGALQDTSCQ |
| | | | VHAWPDRRRWNQTCELLPVSQASWACNLILGAPDSQKLTTVDIVTLRVLCREGV |
| | | | RWRVMAIQDFKPFENLRLMAPISLQVVHVETHRCNISWEISQASHYFERHLEFEA |
| | | | RTLSPGHTWEEAPLLTLKQKQEWICLETLTPDTQYEFQVRVKPLQGEFTTWSPW |
| | | | SQPLAFRTKPAALGKD |
| | [symbol] 451 | APTSSSTKKTQL | AKTEPKSSDKTHTCPPCPAPELLGGPSVFLFPPKPKDTLMISRTPEVTCVVVDVSH |
| | | QLEHLLLDLQMI | EDPEVKFNWYVDGVEVHNAKTKPREEQYASTYRVVSVLTVLHQDWLNGKEYKC |
| | | LNGINNYKNPKL | KVSNKALPAPIEKTISKAKGQPREPQVYTLPPCRDELTKNQVSLWCLVKGFYPSDI |
| | | TAMLTAKFAMP | AVEWESNGQPENNYKTTPPVLDSDGSFFLYSKLTVDKSRWQQGNVFSCSVMHE |
| | | KKATELKHLQCL | ALHNHYTQKSLSLSPGGSPGVPLSLYSGPAPTSSSTKKTQLQLEHLLLDLQMILNGI |
| | | EEALKPLEEVLN | NNYKNPKLTAMLTAKFAMPKKATELKHLQCLEEALKPLEEVLN LAQSKNFHLRPR |
| | | LAQSKNFHLRPR | DLISNINVIVLELKGSETTFMCEYADETATIVEFLNRWITFAQSIISTLT |
| | | DLISNINVIVLEL | |
| | | KGSETTFMCEY | |
| | | ADETATIVEFLN | |
| | | RWITFAQSIISTL | |
| | | T | |
| | [symbol] 452 | | DKTHTCPPCPAPELLGGPSVFLFPPKPKDTLMISRTPEVTCVVVDVSHEDPEVKFN |
| | | | WYVDGVEVHNAKTKPREEQYASTYRVVSVLTVLHQDWLNGKEYKCKVSNKALP |
| | | | APIEKTISKAKGQPREPQVCTLPPSRDELTKNQVSLSCAVKGFYPSDIAVEWESNG |
| | | | QPENNYKTTPPVLDSDGSFFLVSKLTVDKSRWQQGNVFSCSVMHEALHNHYTQ |
| | | | KSLSLSPGPGSGSAVNGTSQFTCFYNSRANISCVWSQDGALQDTSCQVHAWPDR |
| | | | RRWNQTCELLPVSQASWACNLILGAPDSQKLTTVDIVTLRVLCREGVRWRVMAI |
| | | | QDFKPFENLRLMAPISLQVVHVETHRCNISWEISQASHYFERHLEFEARTLSPGHT |
| | | | WEEAPLLTLKQKQEWICLETLTPDTQYEFQVRVKPLQGEFTTWSPWSQPLAFRT |
| | | | KPAALGKD |
| | [symbol] 452 | APTSSSTKKT1L | DKTHTCPPCPAPELLGGPSVFLFPPKPKDTLMISRTPEVTCVVVDVSHEDPEVKFN |
| | | QLRHLCLRLQMI | WYVDGVEVHNAKTKPREEQYASTYRVVSVLTVLHQDWLNGKEYKCKVSNKALP |
| | | LNGINNYKNPKL | APIEKTISKAKGQPREPQVYTLPPCRDELTKNQVSLWCLVKGFYPSDIAVEWESN |
| | | TAMLTAKFAMP | GQPENNYKTTPPVLDSDGSFFLYSKLTVDKSRWQQGNVFSCSVMHEALHNHYT |
| | | KKATELKHLQCL | QKSLSLSPGGSPGVPLSLYSGPAPTSSSTKKTQLQLRHLCLRLQMILNGINNYKNPK |
| | | EEALKPLEEVLN | LTAMLTAKFAMPKKATELKHLQCLEEALKPLEEVLNLAQSKNFHLRPRDLISLINVI |
| | | LAQSKNFHLRPR | VLELKGSETTFMCEYADETATIVEFLNRWITFCQSIISTLT |
| | | DLISLINVIVLELK | |
| | | GSETTFMCEYA | |
| | | DETATIVEFLNR | |
| | | WITFCQSIISTLT | |
| | [symbol] 453 | | DKTHTCPPCPAPELLGGPSVFLFPPKPKDTLMISRTPEVTCVVVDVSHEDPEVKFN |
| | | | WYVDGVEVHNAKTKPREEQYASTYRVVSVLTVLHQDWLNGKEYKCKVSNKALP |
| | | | APIEKTISKAKGQPREPQVCTLPPSRDELTKNQVSLSCAVKGFYPSDIAVEWESNG |
| | | | QPENNYKTTPPVLDSDGSFFLVSKLTVDKSRWQQGNVFSCSVMHEALHNHYTQ |
| | | | KSLSLSPGPGSGSAVNGTSQFTCFYNSRANISCVWSQDGALQDTSCQVHAWPDR |
| | | | RRWNQTCELLPVSQASWACNLILGAPDSQKLTTVDIVTLRVLCREGVRWRVMAI |
| | | | QDFKPFENLRLMAPISLQVVHVETHRCNISWEISQASHYFERHLEFEARTLSPGHT |
| | | | WEEAPLLTLKQKQEWICLETLTPDTQYEFQVRVKPLQGEFTTWSPWSQPLAFRT |
| | | | KPAALGKD |
| | [symbol] 453 | APTSSSTKKTQL | DKTHTCPPCPAPELLGGPSVFLFPPKPKDTLMISRTPEVTCVVVDVSHEDPEVKFN |
| | | QLLHLCLRLQMI | WYVDGVEVHNAKTKPREEQYASTYRVVSVLTVLHQDWLNGKEYKCKVSNKALP |
| | | LNGINNYKNPKL | APIEKTISKAKGQPREPQVYTLPPCRDELTKNQVSLWCLVKGFYPSDIAVEWESN |
| | | TAMLTAKFAMP | GQPENNYKTTPPVLDSDGSFFLYSKLTVDKSRWQQGNVFSCSVMHEALHNHYT |
| | | KKATELKHLQCL | QKSLSLSPGGSPGVPLSLYSGPAPTSSSTKKTQLQLLHLCLRLQMILNGINNYKNPK |
| | | EEALKPLEEVLN | LTAMLTAKFAMPKKATELKHLQCLEEALKPLEEVLNLAQSKNFHLRPRDLISLINVI |
| | | LAQSKNFHLRPR | VLELKGSETTFMCEYADETATIVEFLNRWITFCQSIISTLT |
| | | DLISLINVIVLELK | |
| | | GSETTFMCEYA | |
| | | DETATIVEFLNR | |
| | | WITFCQSIISTLT | |
| | [symbol] 454 | | DKTHTCPPCPAPELLGGPSVFLFPPKPKDTLMISRTPEVTCVVVDVSHEDPEVKFN |
| | | | WYVDGVEVHNAKTKPREEQYASTYRVVSVLTVLHQDWLNGKEYKCKVSNKALP |
| | | | APIEKTISKAKGQPREPQVCTLPPSRDELTKNQVSLSCAVKGFYPSDIAVEWESNG |
| | | | QPENNYKTTPPVLDSDGSFFLVSKLTVDKSRWQQGNVFSCSVMHEALHNHYTQ |
| | | | KSLSLSPGPGSGSAVNGTSQFTCFYNSRANISCVWSQDGALQDTSCQVHAWPDR |
| | | | RRWNQTCELLPVSQASWACNLILGAPDSQKLTTVDIVTLRVLCREGVRWRVMAI |
| | | | QDFKPFENLRLMAPISLQVVHVETHRCNISWEISQASHYFERHLEFEARTLSPGHT |
| | | | WEEAPLLTLKQKQEWICLETLTPDTQYEFQVRVKPLQGEFTTWSPWSQPLAFRT |
| | | | KPAALGKD |
| | [symbol] 454 | APTSSSTKKTQL | DKTHTCPPCPAPELLGGPSVFLFPPKPKDTLMISRTPEVTCVVVDVSHEDPEVKFN |
| | | QLRHLCLDLQM | WYVDGVEVHNAKTKPREEQYASTYRVVSVLTVLHQDWLNGKEYKCKVSNKALP |
| | | ILNGINNYKNPK | APIEKTISKAKGQPREPQVYTLPPCRDELTKNQVSLWCLVKGFYPSDIAVEWESN |
| | | LTAMLTAKFAM | GQPENNYKTTPPVLDSDGSFFLYSKLTVDKSRWQQGNVFSCSVMHEALHNHYT |
| | | PKKATELKHLQC | QKSLSLSPGGSPGVPLSLYSGPAPTSSSTKKTQLQLRHLCLDLQMILNGINNYKNP |
| | | LEEALKPLEEVL | KLTAMLTAKFAMPKKATELKHLQCLEEALKPLEEVLNLAQSKNFHLRPRDLISLINV |
| | | NLAQSKNFHLR | IVLELKGSETTFMCEYADETATIVEFLNRWITFCQSIISTLT |
| | | PRDLISLINVIVL | |
| | | ELKGSETTFMCE | |
| | | YADETATIVEFL | |
| | | NRWITFCQSIIST | |
| | | LT | |
| | [symbol] 455 | | DKTHTCPPCPAPELLGGPSVFLFPPKPKDTLMISRTPEVTCVVVDVSHEDPEVKFN |
| | | | WYVDGVEVHNAKTKPREEQYASTYRVVSVLTVLHQDWLNGKEYKCKVSNKALP |
| | | | APIEKTISKAKGQPREPQVCTLPPSRDELTKNQVSLSCAVKGFYPSDIAVEWESNG |
| | | | QPENNYKTTPPVLDSDGSFFLVSKLTVDKSRWQQGNVFSCSVMHEALHNHYTQ |
| | | | KSLSLSPGPGSGSAVNGTSQFTCFYNSRANISCVWSQDGALQDTSCQVHAWPDR |
| | | | RRWNQTCELLPVSQASWACNLILGAPDSQKLTTVDIVTLRVLCREGVRWRVMAI |
| | | | QDFKPFENLRLMAPISLQVVHVETHRCNISWEISQASHYFERHLEFEARTLSPGHT |
| | | | WEEAPLLTLKQKQEWICLETLTPDTQYEFQVRVKPLQGEFTTWSPWSQPLAFRT |
| | | | KPAALGKD |
| | [symbol] 455 | APTSSSTKKTQL | DKTHTCPPCPAPELLGGPSVFLFPPKPKDTLMISRTPEVTCVVVDVSHEDPEVKFN |
| | | QLEHLCLRLQMI | WYVDGVEVHNAKTKPREEQYASTYRVVSVLTVLHQDWLNGKEYKCKVSNKALP |
| | | LNGINNYKNPKL | APIEKTISKAKGQPREPQVYTLPPCRDELTKNQVSLWCLVKGFYPSDIAVEWESN |
| | | TAMLTAKFAMP | GQPENNYKTTPPVLDSDGSFFLYSKLTVDKSRWQQGNVFSCSVMHEALHNHYT |
| | | KKATELKHLQCL | QKSLSLSPGGSPGVPLSLYSGPAPTSSSTKKTQLQLEHLCLRLQMILNGINNYKNPK |
| | | EEALKPLEEVLN | LTAMLTAKFAMPKKATELKHLQCLEEALKPLEEVLNLAQSKNFHLRPRDLISLINVI |
| | | LAQSKNFHLRPR | VLELKGSETTFMCEYADETATIVEFLNRWITFCQSIISTLT |
| | | DLISLINVIVLELK | |
| | | GSETTFMCEYA | |
| | | DETATIVEFLNR | |
| | | WITFCQSIISTLT | |
| | [symbol] 456 | | DKTHTCPPCPAPELLGGPSVFLFPPKPKDTLMISRTPEVTCVVVDVSHEDPEVKFN |
| | | | WYVDGVEVHNAKTKPREEQYASTYRVVSVLTVLHQDWLNGKEYKCKVSNKALP |
| | | | APIEKTISKAKGQPREPQVCTLPPSRDELTKNQVSLSCAVKGFYPSDIAVEWESNG |
| | | | QPENNYKTTPPVLDSDGSFFLVSKLTVDKSRWQQGNVFSCSVMHEALHNHYTQ |
| | | | KSLSLSPGPGSGSAVNGTSQFTCFYNSRANISCVWSQDGALQDTSCQVHAWPDR |
| | | | RRWNQTCELLPVSQASWACNLILGAPDSQKLTTVDIVTLRVLCREGVRWRVMAI |
| | | | QDFKPFENLRLMAPISLQVVHVETHRCNISWEISQASHYFERHLEFEARTLSPGHT |
| | | | WEEAPLLTLKQKQEWICLETLTPDTQYEFQVRVKPLQGEFTTWSPWSQPLAFRT |
| | | | KPAALGKD |
| | [symbol] 456 | APTSSSTKKTQL | DKTHTCPPCPAPELLGGPSVFLFPPKPKDTLMISRTPEVTCVVVDVSHEDPEVKFN |
| | | QLFHLCLRLQMI | WYVDGVEVHNAKTKPREEQYASTYRVVSVLTVLHQDWLNGKEYKCKVSNKALP |
| | | LNGINNYKNPKL | APIEKTISKAKGQPREPQVYTLPPCRDELTKNQVSLWCLVKGFYPSDIAVEWESN |
| | | TAMLTAKFAMP | GQPENNYKTTPPVLDSDGSFFLYSKLTVDKSRWQQGNVFSCSVMHEALHNHYT |
| | | KKATELKHLQCL | QKSLSLSPGGSPGVPLSLYSGPAPTSSSTKKTQLQLFHLCLRLQMILNGINNYKNPK |
| | | EEALKPLEEVLN | LTAMLTAKFAMPKKATELKHLQCLEEALKPLEEVLNLAQSKNFHLRPRDLISLINVI |
| | | LAQSKNFHLRPR | VLELKGSETTFMCEYADETATIVEFLNRWITFCQSIISTLT |
| | | DLISLINVIVLELK | |
| | | GSETTFMCEYA | |
| | | DETATIVEFLNR | |
| | | WITFCQSIISTLT | |
| | [symbol] 462 | | VRSGCKPCICTVPEVSSVFIFPPKPKDVLTITLTPKVTCVVVAISKDDPEVQFSWFV |
| | | | DDVEVHTAQTQPREEQFNSTFRSVSELPIMHQDWLNGKEFKCRVNSAAFGAPIE |
| | | | KTISKTKGRPKAPQVYTIPPPKEQMAKDKVSLTCMITDFFPEDITVEWQWNGQP |
| | | | AENYDNTQPIMDTDGSYFVYSDLNVQKSNWEAGNTFTCSVLHEGLHNHHTEKS |
| | | | LSHSPGGGSSPPGGGSSGGGSGPAPTSSSTKKTQLQLEHLLLDLQMILNGINNYK |
| | | | NPKLTAMLTAKFAMPKKATELKHLQCLEEALKPLEEVLNLAQSKNFHLRPRDLISN |
| | | | INVIVLELKGSETTFMCEYADETATIVEFLNRWITFAQSIISTLT |
| | [symbol] 462 | | VRSGCKPCICTVPEVSSVFIFPPKPKDVLTITLTPKVTCVVVAISKDDPEVQFSWFV |
| | | | DDVEVHTAQTQPREEQFNSTFRSVSELPIMHQDWLNGKEFKCRVNSAAFGAPIE |
| | | | KTISKTKGRPKAPQVYTIPPPKKQMAKDKVSLTCMITDFFPEDITVEWQWNGQP |
| | | | AENYKNTQPIMKTDGSYFVYSKLNVQKSNWEAGNTFTCSVLHEGLHNHHTEKSL |
| | | | SHSPG |
| | [symbol] 463 | | VRSGCKPCICTVPEVSSVFIFPPKPKDVLTITLTPKVTCVVVAISKDDPEVQFSWFV |
| | | | DDVEVHTAQTQPREEQFNSTFRSVSELPIMHQDWLNGKEFKCRVNSAAFGAPIE |
| | | | KTISKTKGRPKAPQVYTIPPPKEQMAKDKVSLTCMITDFFPEDITVEWQWNGQP |
| | | | AENYDNTQPIMDTDGSYFVYSDLNVQKSNWEAGNTFTCSVLHEGLHNHHTEKS |
| | | | LSHSPGGGSSPPGGGSSGGGSGPAPTSSSTKKTQLQLEHLLLDLQMILNGINNYK |
| | | | NPKLTAMLTAKFAMPKKATELKHLQCLEEALKPLEEVLNLAQSKNFHLRPRDLISN |
| | | | INVIVLELKGSETTFMCEYADETATIVEFLNRWITFAQSIISTLT |
| | [symbol] 463 | | VRSGCKPCICTVPEVSSVFIFPPKPKDVLTITLTPKVTCVVVAISKDDPEVQFSWFV |
| | | | DDVEVHTAQTQPREEQFNSTFRSVSELPIMHQDWLNGKEFKCRVNSAAFGAPIE |
| | | | KTISKTKGRPKAPQVYTIPPPKKQMAKDKVSLTCMITDFFPEDITVEWQWNGQP |
| | | | AENYKNTQPIMKTDGSYFVYSKLNVQKSNWEAGNTFTCSVLHEGLHNHHTEKSL |
| | | | SHSPGPGSGSAVNGTSQFTCFYNSRANISCVWSQDGALQDTSCQVHAWPDRRR |
| | | | WNQTCELLPVSQASWACNLILGAPDSQKLTTVDIVTLRVLCREGVRWRVMAIQ |
| | | | DFKPFENLRLMAPISLQVVHVETHRCNISWEISQASHYFERHLEFEARTLSPGHT |
| | | | WEEAPLLTLKQKQEWICLETLTPDTQYEFQVRVKPLQGEFTTWSPWSQPLAFRT |
| | | | KPAALGKD |
| | [symbol] 464 | | VRSGCKPCICTVPEVSSVFIFPPKPKDVLTITLTPKVTCVVVAISKDDPEVQFSWFV |
| | | | DDVEVHTAQTQPREEQFNSTFRSVSELPIMHQDWLNGKEFKCRVNSAAFGAPIE |
| | | | KTISKTKGRPKAPQVYTIPPPKEQMAKDKVSLTCMITDFFPEDITVEWQWNGQP |
| | | | AENYDNTQPIMDTDGSYFVYSDLNVQKSNWEAGNTFTCSVLHEGLHNHHTEKS |
| | | | LSHSPGGGSSPPGGGSSGGGSGPAPTSSSTKKTQLQLEHLLLDLQMILNGINNYK |
| | | | NPKLTAMLTAKFAMPKKATELKHLQCLEEALKPLEEVLNLAQSKNFHLRPRDLISN |
| | | | INVIVLELKGSETTFMCEYADETATIVEFLNRWITFAQSIISTLT |
| | [symbol] 464 | | VRSGCKPCICTVPEVSSVFIFPPKPKDVLTITLTPKVTCVVVAISKDDPEVQFSWFV |
| | | | DDVEVHTAQTQPREEQFNSTFRSVSELPIMHQDWLNGKEFKCRVNSAAFGAPIE |
| | | | KTISKTKGRPKAPQVYTIPPPKKQMAKDKVSLTCMITDFFPEDITVEWQWNGQP |
| | | | AENYKNTQPIMKTDGSYFVYSKLNVQKSNWEAGNTFTCSVLHEGLHNHHTEKSL |
| | | | SHSPGPGSGSAVKNCSHLECFYNSRANVSCMWSHEEALNVTTCHVHAKSNLRH |
| | | | WNKTCELTLVRQASWACNLILGSFPESQSLTSVDLLDINVVCWEEKGWRRVKTC |
| | | | DFHPFDNLRLVAPHSLQVLHIDTQRCNISWKVSQVSHYIEPYLEFEARRRLLGHS |
| | | | WEDASVLSLKQRQQWLFLEMLIPSTSYEVQVRVKAQRNNTGTWSPWSQPLTFR |
| | | | TRPADPMKE |
| | [symbol] 465 | APTSSSTKKTQL | VRSGCKPCICTVPEVSSVFIFPPKPKDVLTITLTPKVTCVVVAISKDDPEVQFSWFV |
| | | QLEHLLLDLQMI | DDVEVHTAQTQPREEQFNSTFRSVSELPIMHQDWLNGKEFKCRVNSAAFGAPIE |
| | | LNGINNYKNPKL | KTISKTKGRPKAPQVYTIPPPKEQMAKDKVSLTCMITDFFPEDITVEWQWNGQP |
| | | TAMLTAKFAMP | AENYDNTQPIMDTDGSYFVYSDLNVQKSNWEAGNTFTCSVLHEGLHNHHTEKS |
| | | KKATELKHLQCL | LSHSPGGSPGVPLSLYSGPAPTSSSTKKTQLQLEHLLLDLQMILNGINNYKNPKLTA |
| | | EEALKPLEEVLN | MLTAKFAMPKKATELKHLQCLEEALKPLEEVLNLAQSKNFHLRPRDLISNINVIVLE |
| | | LAQSKNFHLRPR | LKGSETTFMCEYADETATIVEFLNRWITFAQSIISTLT |
| | | DLISNINVIVLEL | |
| | | KGSETTFMCEY | |
| | | ADETATIVEFLN | |
| | | RWITFAQSIISTL | |
| | | T | |
| | [symbol] 465 | | VRSGCKPCICTVPEVSSVFIFPPKPKDVLTITLTPKVTCVVVAISKDDPEVQFSWFV |
| | | | DDVEVHTAQTQPREEQFNSTFRSVSELPIMHQDWLNGKEFKCRVNSAAFGAPIE |
| | | | KTISKTKGRPKAPQVYTIPPPKKQMAKDKVSLTCMITDFFPEDITVEWQWNGQP |
| | | | AENYKNTQPIMKTDGSYFVYSKLNVQKSNWEAGNTFTCSVLHEGLHNHHTEKSL |
| | | | SHSPG |
| | [symbol] 466 | APTSSSTKKTQL | VRSGCKPCICTVPEVSSVFIFPPKPKDVLTITLTPKVTCVVVAISKDDPEVQFSWFV |
| | | QLEHLLLDLQMI | DDVEVHTAQTQPREEQFNSTFRSVSELPIMHQDWLNGKEFKCRVNSAAFGAPIE |
| | | LNGINNYKNPKL | KTISKTKGRPKAPQVYTIPPPKEQMAKDKVSLTCMITDFFPEDITVEWQWNGQP |
| | | TAMLTAKFAMP | AENYDNTQPIMDTDGSYFVYSDLNVQKSNWEAGNTFTCSVLHEGLHNHHTEKS |
| | | KKATELKHLQCL | LSHSPGGSPGVPLSLYSGPAPTSSSTKKTQLQLEHLLLDLQMILNGINNYKNPKLTA |
| | | EEALKPLEEVLN | MLTAKFAMPKKATELKHLQCLEEALKPLEEVLNLAQSKNFHLRPRDLISNINVIVLE |
| | | LAQSKNFHLRPR | LKGSETTFMCEYADETATIVEFLNRWITFAQSIISTLT |
| | | DLISNINVIVLEL | |
| | | KGSETTFMCEY | |
| | | ADETATIVEFLN | |
| | | RWITFAQSIISTL | |
| | | T | |
| | [symbol] 466 | | VRSGCKPCICTVPEVSSVFIFPPKPKDVLTITLTPKVTCVVVAISKDDPEVQFSWFV |
| | | | DDVEVHTAQTQPREEQFNSTFRSVSELPIMHQDWLNGKEFKCRVNSAAFGAPIE |
| | | | KTISKTKGRPKAPQVYTIPPPKKQMAKDKVSLTCMITDFFPEDITVEWQWNGQP |
| | | | AENYKNTQPIMKTDGSYFVYSKLNVQKSNWEAGNTFTCSVLHEGLHNHHTEKSL |
| | | | SHSPGPGSGSAVNGTSQFTCFYNSRANISCVWSQDGALQDTSCQVHAWPDRRR |
| | | | WNQTCELLPVSQASWACNLILGAPDSQKLTTVDIVTLRVLCREGVRWRVMAIQ |
| | | | DFKPFENLRLMAPISLQVVHVETHRCNISWEISQASHYFERHLEFEARTLSPGHT |
| | | | WEEAPLLTLKQKQEWICLETLTPDTQYEFQVRVKPLQGEFTTWSPWSQPLAFRT |
| | | | KPAALGKD |
| | [symbol] 467 | APTSSSTKKTQL | VRSGCKPCICTVPEVSSVFIFPPKPKDVLTITLTPKVTCVVVAISKDDPEVQFSWFV |
| | | QLEHLLLDLQMI | DDVEVHTAQTQPREEQFNSTFRSVSELPIMHQDWLNGKEFKCRVNSAAFGAPIE |
| | | LNGINNYKNPKL | KTISKTKGRPKAPQVYTIPPPKEQMAKDKVSLTCMITDFFPEDITVEWQWNGQP |
| | | TAMLTAKFAMP | AENYDNTQPIMDTDGSYFVYSDLNVQKSNWEAGNTFTCSVLHEGLHNHHTEKS |
| | | KKATELKHLQCL | LSHSPGGSPGVPLSLYSGPAPTSSSTKKTQLQLEHLLLDLQMILNGINNYKNPKLTA |
| | | EEALKPLEEVLN | MLTAKFAMPKKATELKHLQCLEEALKPLEEVLNLAQSKNFHLRPRDLISNINVIVLE |
| | | LAQSKNFHLRPR | LKGSETTFMCEYADETATIVEFLNRWITFAQSIISTLT |
| | | DLISNINVIVLEL | |
| | | KGSETTFMCEY | |
| | | ADETATIVEFLN | |
| | | RWITFAQSIISTL | |
| | | T | |
| | [symbol] 467 | | VRSGCKPCICTVPEVSSVFIFPPKPKDVLTITLTPKVTCVVVAISKDDPEVQFSWFV |
| | | | DDVEVHTAQTQPREEQFNSTFRSVSELPIMHQDWLNGKEFKCRVNSAAFGAPIE |
| | | | KTISKTKGRPKAPQVYTIPPPKKQMAKDKVSLTCMITDFFPEDITVEWQWNGQP |
| | | | AENYKNTQPIMKTDGSYFVYSKLNVQKSNWEAGNTFTCSVLHEGLHNHHTEKSL |
| | | | SHSPGPGSGSAVKNCSHLECFYNSRANVSCMWSHEEALNVTTCHVHAKSNLRH |
| | | | WNKTCELTLVRQASWACNLILGSFPESQSLTSVDLLDINVVCWEEKGWRRVKTC |
| | | | DFHPFDNLRLVAPHSLQVLHIDTQRCNISWKVSQVSHYIEPYLEFEARRRLLGHS |
| | | | WEDASVLSLKQRQQWLFLEMLIPSTSYEVQVRVKAQRNNTGTWSPWSQPLTFR |
| | | | TRPADPMKE |
| | [symbol] 468 | | DKTHTCPPCPAPELLGGPSVFLFPPKPKDTLYITREPEVTCVVVDVSHEDPEVKFN |
| | | | WYVDGVEVHNAKTKPREEQYASTYRVVSVLTVLHQDWLNGKEYKCKVSNKALP |
| | | | APIEKTISKAKGQPREPQVCTLPPSRDELTKNQVSLSCAVKGFYPSDIAVEWESNG |
| | | | QPENNYKTTPPVLDSDGSFFLVSKLTVDKSRWQQGNVFSCSVMHEALHNHYTQ |
| | | | KSLSLSPGPGSGSAVNGTSQFTCFYNSRANISCVWSQDGALQDTSCQVHAWPDR |
| | | | RRWNQTCELLPVSQASWACNLILGAPDSQKLTTVDIVTLRVLCREGVRWRVMAI |
| | | | QDFKPFENLRLMAPISLQVVHVETHRCNISWEISQASHYFERHLEFEARTLSPGHT |
| | | | WEEAPLLTLKQKQEWICLETLTPDTQYEFQVRVKPLQGEFTTWSPWSQPLAFRT |
| | | | KPAALGKD |
| | [symbol] 468 | APTSSSTKKTQL | DKTHTCPPCPAPELLGGPSVFLFPPKPKDTLYITREPEVTCVVVDVSHEDPEVKFN |
| | | QLEHLLLDLQMI | WYVDGVEVHNAKTKPREEQYASTYRVVSVLTVLHQDWLNGKEYKCKVSNKALP |
| | | LNGINNYKNPKL | APIEKTISKAKGQPREPQVYTLPPCRDELTKNQVSLWCLVKGFYPSDIAVEWESN |
| | | TAMLTAKFAMP | GQPENNYKTTPPVLDSDGSFFLYSKLTVDKSRWQQGNVFSCSVMHEALHNHYT |
| | | KKATELKHLQCL | QKSLSLSPGGSPGVPLSLYSGPAPTSSSTKKTQLQLEHLLLDLQMILNGINNYKNPK |
| | | EEALKPLEEVLN | LTAMLTAKFAMPKKATELKHLQCLEEALKPLEEVLNLAQSKNFHLRPRDLISNINVI |
| | | LAQSKNFHLRPR | VLELKGSETTFMCEYADETATIVEFLNRWITFAQSIISTLT |
| | | DLISNINVIVLEL | |
| | | KGSETTFMCEY | |
| | | ADETATIVEFLN | |
| | | RWITFAQSIISTL | |
| | | T | |
| | [symbol] 469 | | DKTHTCPPCPAPELLGGPSVFLFPPKPKDTLMASRTPEVTCVVVDVSHEDPEVKF |
| | | | NWYVDGVEVHNAKTKPREEQYASTYRVVSVLTVLHQDWLNGKEYKCKVSNKAL |
| | | | PAPIEKTISKAKGQPREPQVCTLPPSRDELTKNQVSLSCAVKGFYPSDIAVEWESN |
| | | | GQPENNYKTTPPVLDSDGSFFLVSKLTVDKSRWQQGNVFSCSVMHEALHNHYT |
| | | | QKSLSLSPGPGSGSAVNGTSQFTCFYNSRANISCVWSQDGALQDTSCQVHAWP |
| | | | DRRRWNQTCELLPVSQASWACNLILGAPDSQKLTTVDIVTLRVLCREGVRWRV |
| | | | MAIQDFKPFENLRLMAPISLQVVHVETHRCNISWEISQASHYFERHLEFEARTLSP |
| | | | GHTWEEAPLLTLKQKQEWICLETLTPDTQYEFQVRVKPLQGEFTTWSPWSQPLA |
| | | | FRTKPAALGKD |
| | [symbol] 469 | | DKTHTCPPCPAPELLGGPSVFLFPPKPKDTLMASRTPEVTCVVVDVSHEDPEVKF |
| | | | NWYVDGVEVHNAKTKPREEQYASTYRVVSVLTVLHQDWLNGKEYKCKVSNKAL |
| | | | PAPIEKTISKAKGQPREPQVYTLPPCRDELTKNQVSLWCLVKGFYPSDIAVEWESN |
| | | | GQPENNYKTTPPVLDSDGSFFLYSKLTVDKSRWQQGNVFSCSVMHEALHNHYT |
| | | | QKSLSLSPGGGSSPPGGGSSGGGSGPAPTSSSTKKTQLQLEHLLLDLQMILNGINN |
| | | | YKNPKLTAMLTAKFAMPKKATELKHLQCLEEALKPLEEVLNLAQSKNFHLRPRDLI |
| | | | SNINVIVLELKGSETTFMCEYADETATIVEFLNRWITFAQSIISTLT |
| | [symbol] 470 | | DKTHTCPPCPAPELLGGPSVFLFPPKPKDTLYITREPEVTCVVVDVSHEDPEVKFN |
| | | | WYVDGVEVHNAKTKPREEQYASTYRVVSVLTVLHQDWLNGKEYKCKVSNKALP |
| | | | APIEKTISKAKGQPREPQVCTLPPSRDELTKNQVSLSCAVKGFYPSDIAVEWESNG |
| | | | QPENNYKTTPPVLDSDGSFFLVSKLTVDKSRWQQGNVFSCSVMHEALHNHYTQ |
| | | | KSLSLSPGPGSGSAVNGTSQFTCFYNSRANISCVWSQDGALQDTSCQVHAWPDR |
| | | | RRWNQTCELLPVSQASWACNLILGAPDSQKLTTVDIVTLRVLCREGVRWRVMAI |
| | | | QDFKPFENLRLMAPISLQVVHVETHRCNISWEISQASHYFERHLEFEARTLSPGHT |
| | | | WEEAPLLTLKQKQEWICLETLTPDTQYEFQVRVKPLQGEFTTWSPWSQPLAFRT |
| | | | KPAALGKD |
| | [symbol] 470 | | DKTHTCPPCPAPELLGGPSVFLFPPKPKDTLYITREPEVTCVVVDVSHEDPEVKFN |
| | | | WYVDGVEVHNAKTKPREEQYASTYRVVSVLTVLHQDWLNGKEYKCKVSNKALP |
| | | | APIEKTISKAKGQPREPQVYTLPPCRDELTKNQVSLWCLVKGFYPSDIAVEWESN |
| | | | GQPENNYKTTPPVLDSDGSFFLYSKLTVDKSRWQQGNVFSCSVMHEALHNHYT |
| | | | QKSLSLSPGGGSSPPGGGSSGGGSGPAPTSSSTKKTQLQLEHLLLDLQMILNGINN |
| | | | YKNPKLTAMLTAKFAMPKKATELKHLQCLEEALKPLEEVLNLAQSKNFHLRPRDLI |
| | | | SNINVIVLELKGSETTFMCEYADETATIVEFLNRWITFAQSIISTLT |
| | [symbol] 471 | | DKTHTCPPCPAPELLGGPSVFLFPPKPKDTLMASRTPEVTCVVVDVSHEDPEVKF |
| | | | NWYVDGVEVHNAKTKPREEQYASTYRVVSVLTVLHQDWLNGKEYKCKVSNKAL |
| | | | PAPIEKTISKAKGQPREPQVCTLPPSRDELTKNQVSLSCAVKGFYPSDIAVEWESN |
| | | | GQPENNYKTTPPVLDSDGSFFLVSKLTVDKSRWQQGNVFSCSVMHEALHNHYT |
| | | | QKSLSLSPGPGSGSAVNGTSQFTCFYNSRANISCVWSQDGALQDTSCQVHAWP |
| | | | DRRRWNQTCELLPVSQASWACNLILGAPDSQKLTTVDIVTLRVLCREGVRWRV |
| | | | MAIQDFKPFENLRLMAPISLQVVHVETHRCNISWEISQASHYFERHLEFEARTLSP |
| | | | GHTWEEAPLLTLKQKQEWICLETLTPDTQYEFQVRVKPLQGEFTTWSPWSQPLA |
| | | | FRTKPAALGKD |
| | [symbol] 471 | APTSSSTKKTQL | DKTHTCPPCPAPELLGGPSVFLFPPKPKDTLMASRTPEVTCVVVDVSHEDPEVKF |
| | | QLEHLLLDLQMI | NWYVDGVEVHNAKTKPREEQYASTYRVVSVLTVLHQDWLNGKEYKCKVSNKAL |
| | | LNGINNYKNPKL | PAPIEKTISKAKGQPREPQVYTLPPCRDELTKNQVSLWCLVKGFYPSDIAVEWESN |
| | | TAMLTAKFAMP | GQPENNYKTTPPVLDSDGSFFLYSKLTVDKSRWQQGNVFSCSVMHEALHNHYT |
| | | KKATELKHLQCL | QKSLSLSPGGSPGVPLSLYSGPAPTSSSTKKTQLQLEHLLLDLQMILNGINNYKNPK |
| | | EEALKPLEEVLN | LTAMLTAKFAMPKKATELKHLQCLEEALKPLEEVLNLAQSKNFHLRPRDLISNINVI |
| | | LAQSKNFHLRPR | VLELKGSETTFMCEYADETATIVEFLNRWITFAQSIISTLT |
| | | DLISNINVIVLEL | |
| | | KGSETTFMCEY | |
| | | ADETATIVEFLN | |
| | | RWITFAQSIISTL | |
| | | T | |
| | [symbol] 475 | | DKTHTCPPCPAPELLGGPSVFLFPPKPKDTLMISRTPEVTCVVVDVSHEDPEVKFN |
| | | | WYVDGVEVHNAKTKPREEQYASTYRVVSVLTVLHQDWLNGKEYKCKVSNKALP |
| | | | APIEKTISKAKGQPREPQVYTLPPCRDELTKNQVSLWCLVKGFYPSDIAVEWESN |
| | | | GQPENNYKTTPPVLDSDGSFFLYSKLTVDKSRWQQGNVFSCSVMHEALHNHYT |
| | | | QKSLSLSPGGGSSPPGGGSSGGGSGPAPTSSSTKKTQLQLEHLLLDLQMILNGINN |
| | | | YKNPKLTAMLTAKFAMPKKATELKHLQCLEEALKPLEEVLNLAQSKNFHLRPRDLI |
| | | | SNINVIVLELKGSETTFMCEYADETATIVEFLNRWITFAQSIISTLT |
| | [symbol] 475 | | DKTHTCPPCPAPELLGGPSVFLFPPKPKDTLMISRTPEVTCVVVDVSHEDPEVKFN |
| | | | WYVDGVEVHNAKTKPREEQYASTYRVVSVLTVLHQDWLNGKEYKCKVSNKALP |
| | | | APIEKTISKAKGQPREPQVCTLPPSRDELTKNQVSLSCAVKGFYPSDIAVEWESNG |
| | | | QPENNYKTTPPVLDSDGSFFLVSKLTVDKSRWQQGNVFSCSVMHEALHNHYTQ |
| | | | KSLSLSPGPGSGSAVNGTSQFTCFYNSRANISCVWSQDGALQDTSCQVHAWPDR |
| | | | RRWNQTCELLPVSQASWACNLILGAPDSQKLTTVDIVTLRVLCREGVRWRVMAI |
| | | | QDFKPFENLRLMAPISLQVVHVETHRCNISWEISQASHYFERHLEFEARTLSPGHT |
| | | | WEEAPLLTLKQKQEWISLETLTPDTQYEFQVRVKPLQGEFTTWSPWSQPLAFRT |
| | | | KPAALGKD |
| | [symbol] 476 | APTSSSTKKTQL | DKTHTCPPCPAPELLGGPSVFLFPPKPKDTLMISRTPEVTCVVVDVSHEDPEVKFN |
| | | QLEHLLLDLQMI | WYVDGVEVHNAKTKPREEQYASTYRVVSVLTVLHQDWLNGKEYKCKVSNKALP |
| | | LNGINNYKNPKL | APIEKTISKAKGQPREPQVYTLPPCRDELTKNQVSLWCLVKGFYPSDIAVEWESN |
| | | TAMLTAKFAMP | GQPENNYKTTPPVLDSDGSFFLYSKLTVDKSRWQQGNVFSCSVMHEALHNHYT |
| | | KKATELKHLQCL | QKSLSLSPGGSPGVPLSLYSGPAPTSSSTKKTQLQLEHLLLDLQMILNGINNYKNPK |
| | | EEALKPLEEVLN | LTAMLTAKFAMPKKATELKHLQCLEEALKPLEEVLNLAQSKNFHLRPRDLISNINVI |
| | | LAQSKNFHLRPR | VLELKGSETTFMCEYADETATIVEFLNRWITFAQSIISTLT |
| | | DLISNINVIVLEL | |
| | | KGSETTFMCEY | |
| | | ADETATIVEFLN | |
| | | RWITFAQSIISTL | |
| | | T | |
| | [symbol] 476 | | DKTHTCPPCPAPELLGGPSVFLFPPKPKDTLMISRTPEVTCVVVDVSHEDPEVKFN |
| | | | WYVDGVEVHNAKTKPREEQYASTYRVVSVLTVLHQDWLNGKEYKCKVSNKALP |
| | | | APIEKTISKAKGQPREPQVCTLPPSRDELTKNQVSLSCAVKGFYPSDIAVEWESNG |
| | | | QPENNYKTTPPVLDSDGSFFLVSKLTVDKSRWQQGNVFSCSVMHEALHNHYTQ |
| | | | KSLSLSPGPGSGSAVNGTSQFTCFYNSRANISCVWSQDGALQDTSCQVHAWPDR |
| | | | RRWNQTCELLPVSQASWACNLILGAPDSQKLTTVDIVTLRVLCREGVRWRVMAI |
| | | | QDFKPFENLRLMAPISLQVVHVETHRCNISWEISQASHYFERHLEFEARTLSPGHT |
| | | | WEEAPLLTLKQKQEWISLETLTPDTQYEFQVRVKPLQGEFTTWSPWSQPLAFRT |
| | | | KPAALGKD |
| | [symbol] 477 | | DKTHTCPPCPAPELLGGPSVFLFPPKPKDTLMISRTPEVTCVVVDVSHEDPEVKFN |
| | | | WYVDGVEVHNAKTKPREEQYASTYRVVSVLTVLHQDWLNGKEYKCKVSNKALP |
| | | | APIEKTISKAKGQPREPQVCTLPPSRDELTKNQVSLSCAVKGFYPSDIAVEWESNG |
| | | | QPENNYKTTPPVLDSDGSFFLVSKLTVDKSRWQQGNVFSCSVMHEALHNHYTQ |
| | | | KSLSLSPG |
| | [symbol] 477 | APTSSSTKKTQL | DKTHTCPPCPAPELLGGPSVFLFPPKPKDTLMISRTPEVTCVVVDVSHEDPEVKFN |
| | | QLRHLCLRLQMI | WYVDGVEVHNAKTKPREEQYASTYRVVSVLTVLHQDWLNGKEYKCKVSNKALP |
| | | LNGINNYKNPKL | APIEKTISKAKGQPREPQVYTLPPCRDELTKNQVSLWCLVKGFYPSDIAVEWESN |
| | | TAMLTAKFAMP | GQPENNYKTTPPVLDSDGSFFLYSKLTVDKSRWQQGNVFSCSVMHEALHNHYT |
| | | KKATELKHLQCL | QKSLSLSPGGSPGVPLSLYSGPAPTSSSTKKTQLQLRHLCLRLQMILNGINNYKNPK |
| | | EEALKPLEEVLN | LTAMLTAKFAMPKKATELKHLQCLEEALKPLEEVLNLAQSKNFHLRPRDLISNINVI |
| | | LAQSKNFHLRPR | VLELKGSETTFMCEYADETATIVEFLNRWITFCQSIISTLT |
| | | DLISNINVIVLEL | |
| | | KGSETTFMCEY | |
| | | ADETATIVEFLN | |
| | | RWITFCQSIISTL | |
| | | T | |
| | [symbol] 484 | | DKTHTCPPCPAPELLGGPSVFLFPPKPKDTLMISRTPEVTCVVVDVSHEDPEVKFN |
| | | | WYVDGVEVHNAKTKPREEQYASTYRVVSVLTVLHQDWLNGKEYKCKVSNKALP |
| | | | APIEKTISKAKGQPREPQVCTLPPSRDELTKNQVSLSCAVKGFYPSDIAVEWESNG |
| | | | QPENNYKTTPPVLDSDGSFFLVSKLTVDKSRWQQGNVFSCSVMHEALHNHYTQ |
| | | | KSLSLSPG |
| | [symbol] 484 | APTSSSTKKTQL | DKTHTCPPCPAPELLGGPSVFLFPPKPKDTLMISRTPEVTCVVVDVSHEDPEVKFN |
| | | QLEHLCLDLQM | WYVDGVEVHNAKTKPREEQYASTYRVVSVLTVLHQDWLNGKEYKCKVSNKALP |
| | | ILNGINNYKNPK | APIEKTISKAKGQPREPQVYTLPPCRDELTKNQVSLWCLVKGFYPSDIAVEWESN |
| | | LTAMLTAKFAM | GQPENNYKTTPPVLDSDGSFFLYSKLTVDKSRWQQGNVFSCSVMHEALHNHYT |
| | | PKKATELKHLQC | QKSLSLSPGGSPGVPLSLYSGPAPTSSSTKKTQLQLEHLCLDLQMILNGINNYKNPK |
| | | LEEALKPLEEVL | LTAMLTAKFAMPKKATELKHLQCLEEALKPLEEVLNLAQSKNFHLRPRDLISNINVI |
| | | NLAQSKNFHLR | VLELKGSETTFMCEYADETATIVEFLNRWITFCQSIISTLT |
| | | PRDLISNINVIVL | |
| | | ELKGSETTFMCE | |
| | | YADETATIVEFL | |
| | | NRWITFCQSIIST | |
| | | LT | |
| | [symbol] 485 | | DKTHTCPPCPAPELLGGPSVFLFPPKPKDTLMISRTPEVTCVVVDVSHEDPEVKFN |
| | | | WYVDGVEVHNAKTKPREEQYASTYRVVSVLTVLHQDWLNGKEYKCKVSNKALP |
| | | | APIEKTISKAKGQPREPQVCTLPPSRDELTKNQVSLSCAVKGFYPSDIAVEWESNG |
| | | | QPENNYKTTPPVLDSDGSFFLVSKLTVDKSRWQQGNVFSCSVMHEALHNHYTQ |
| | | | KSLSLSPG |
| | [symbol] 485 | APTSSSTKKTQL | DKTHTCPPCPAPELLGGPSVFLFPPKPKDTLMISRTPEVTCVVVDVSHEDPEVKFN |
| | | QLEYLLLDLQMI | WYVDGVEVHNAKTKPREEQYASTYRVVSVLTVLHQDWLNGKEYKCKVSNKALP |
| | | LNGINNYKNPKL | APIEKTISKAKGQPREPQVYTLPPCRDELTKNQVSLWCLVKGFYPSDIAVEWESN |
| | | TAMLTAKFAMP | GQPENNYKTTPPVLDSDGSFFLYSKLTVDKSRWQQGNVFSCSVMHEALHNHYT |
| | | KKATELKHLQCL | QKSLSLSPGGSPGVPLSLYSGPAPTSSSTKKTQLQLEYLLLDLQMILNGINNYKNPK |
| | | EEALKPLEEVLN | LTAMLTAKFAMPKKATELKHLQCLEEALKPLEEVLNLAQSKNFHLRPRDLISNINVI |
| | | LAQSKNFHLRPR | VLELKGSETTFMCEYADETATIVEFLNRWITFAQSIISTLT |
| | | DLISNINVIVLEL | |
| | | KGSETTFMCEY | |
| | | ADETATIVEFLN | |
| | | RWITFAQSIISTL | |
| | | T | |
| | [symbol] 486 | | DKTHTCPPCPAPELLGGPSVFLFPPKPKDTLMISRTPEVTCVVVDVSHEDPEVKFN |
| | | | WYVDGVEVHNAKTKPREEQYASTYRVVSVLTVLHQDWLNGKEYKCKVSNKALP |
| | | | APIEKTISKAKGQPREPQVCTLPPSRDELTKNQVSLSCAVKGFYPSDIAVEWESNG |
| | | | QPENNYKTTPPVLDSDGSFFLVSKLTVDKSRWQQGNVFSCSVMHEALHNHYTQ |
| | | | KSLSLSPG |
| | [symbol] 486 | APTSSSTKKTQL | DKTHTCPPCPAPELLGGPSVFLFPPKPKDTLMISRTPEVTCVVVDVSHEDPEVKFN |
| | | QLEELLLDLQMI | WYVDGVEVHNAKTKPREEQYASTYRVVSVLTVLHQDWLNGKEYKCKVSNKALP |
| | | LNGINNYKNPKL | APIEKTISKAKGQPREPQVYTLPPCRDELTKNQVSLWCLVKGFYPSDIAVEWESN |
| | | TAMLTAKFAMP | GQPENNYKTTPPVLDSDGSFFLYSKLTVDKSRWQQGNVFSCSVMHEALHNHYT |
| | | KKATELKHLQCL | QKSLSLSPGGSPGVPLSLYSGPAPTSSSTKKTQLQLEELLLDLQMILNGINNYKNPK |
| | | EEALKPLEEVLN | LTAMLTAKFAMPKKATELKHLQCLEEALKPLEEVLNLAQSKNFHLRPRDLISNINVI |
| | | LAQSKNFHLRPR | VLELKGSETTFMCEYADETATIVEFLNRWITFAQSIISTLT |
| | | DLISNINVIVLEL | |
| | | KGSETTFMCEY | |
| | | ADETATIVEFLN | |
| | | RWITFAQSIISTL | |
| | | T | |
| | [symbol] 487 | | DKTHTCPPCPAPELLGGPSVFLFPPKPKDTLMISRTPEVTCVVVDVSHEDPEVKFN |
| | | | WYVDGVEVHNAKTKPREEQYASTYRVVSVLTVLHQDWLNGKEYKCKVSNKALP |
| | | | APIEKTISKAKGQPREPQVCTLPPSRDELTKNQVSLSCAVKGFYPSDIAVEWESNG |
| | | | QPENNYKTTPPVLDSDGSFFLVSKLTVDKSRWQQGNVFSCSVMHEALHNHYTQ |
| | | | KSLSLSPG |
| | [symbol] 487 | APTSSSTKKTQL | DKTHTCPPCPAPELLGGPSVFLFPPKPKDTLMISRTPEVTCVVVDVSHEDPEVKFN |
| | | QLEHLLLLLQMI | WYVDGVEVHNAKTKPREEQYASTYRVVSVLTVLHQDWLNGKEYKCKVSNKALP |
| | | LNGINNYKNPKL | APIEKTISKAKGQPREPQVYTLPPCRDELTKNQVSLWCLVKGFYPSDIAVEWESN |
| | | TAMLTAKFAMP | GQPENNYKTTPPVLDSDGSFFLYSKLTVDKSRWQQGNVFSCSVMHEALHNHYT |
| | | KKATELKHLQCL | QKSLSLSPGGSPGVPLSLYSGPAPTSSSTKKTQLQLEHLLLLLQMILNGINNYKNPK |
| | | EEALKPLEEVLN | LTAMLTAKFAMPKKATELKHLQCLEEALKPLEEVLNLAQSKNFHLRPRDLISNINVI |
| | | LAQSKNFHLRPR | VLELKGSETTFMCEYADETATIVEFLNRWITFAQSIISTLT |
| | | DLISNINVIVLEL | |
| | | KGSETTFMCEY | |
| | | ADETATIVEFLN | |
| | | RWITFAQSIISTL | |
| | | T | |
| | [symbol] 488 | | DKTHTCPPCPAPELLGGPSVFLFPPKPKDTLMISRTPEVTCVVVDVSHEDPEVKFN |
| | | | WYVDGVEVHNAKTKPREEQYASTYRVVSVLTVLHQDWLNGKEYKCKVSNKALP |
| | | | APIEKTISKAKGQPREPQVCTLPPSRDELTKNQVSLSCAVKGFYPSDIAVEWESNG |
| | | | QPENNYKTTPPVLDSDGSFFLVSKLTVDKSRWQQGNVFSCSVMHEALHNHYTQ |
| | | | KSLSLSPG |
| | [symbol] 488 | APTSSSTKKTQL | DKTHTCPPCPAPELLGGPSVFLFPPKPKDTLMISRTPEVTCVVVDVSHEDPEVKFN |
| | | QLEYLCLDLQMI | WYVDGVEVHNAKTKPREEQYASTYRVVSVLTVLHQDWLNGKEYKCKVSNKALP |
| | | LNGINNYKNPKL | APIEKTISKAKGQPREPQVYTLPPCRDELTKNQVSLWCLVKGFYPSDIAVEWESN |
| | | TAMLTAKFAMP | GQPENNYKTTPPVLDSDGSFFLYSKLTVDKSRWQQGNVFSCSVMHEALHNHYT |
| | | KKATELKHLQCL | QKSLSLSPGGSPGVPLSLYSGPAPTSSSTKKTQLQLEYLCLDLQMILNGINNYKNPK |
| | | EEALKPLEEVLN | LTAMLTAKFAMPKKATELKHLQCLEEALKPLEEVLNLAQSKNFHLRPRDLISNINVI |
| | | LAQSKNFHLRPR | VLELKGSETTFMCEYADETATIVEFLNRWITFCQSIISTLT |
| | | DLISNINVIVLEL | |
| | | KGSETTFMCEY | |
| | | ADETATIVEFLN | |
| | | RWITFCQSIISTL | |
| | | T | |
| | [symbol] 489 | | DKTHTCPPCPAPELLGGPSVFLFPPKPKDTLMISRTPEVTCVVVDVSHEDPEVKFN |
| | | | WYVDGVEVHNAKTKPREEQYASTYRVVSVLTVLHQDWLNGKEYKCKVSNKALP |
| | | | APIEKTISKAKGQPREPQVCTLPPSRDELTKNQVSLSCAVKGFYPSDIAVEWESNG |
| | | | QPENNYKTTPPVLDSDGSFFLVSKLTVDKSRWQQGNVFSCSVMHEALHNHYTQ |
| | | | KSLSLSPG |
| | [symbol] 489 | APTSSSTKKTQL | DKTHTCPPCPAPELLGGPSVFLFPPKPKDTLMISRTPEVTCVVVDVSHEDPEVKFN |
| | | QLEELCLDLQMI | WYVDGVEVHNAKTKPREEQYASTYRVVSVLTVLHQDWLNGKEYKCKVSNKALP |
| | | LNGINNYKNPKL | APIEKTISKAKGQPREPQVYTLPPCRDELTKNQVSLWCLVKGFYPSDIAVEWESN |
| | | TAMLTAKFAMP | GQPENNYKTTPPVLDSDGSFFLYSKLTVDKSRWQQGNVFSCSVMHEALHNHYT |
| | | KKATELKHLQCL | QKSLSLSPGGSPGVPLSLYSGPAPTSSSTKKTQLQLEELCLDLQMILNGINNYKNPK |
| | | EEALKPLEEVLN | LTAMLTAKFAMPKKATELKHLQCLEEALKPLEEVLNLAQSKNFHLRPRDLISNINVI |
| | | LAQSKNFHLRPR | VLELKGSETTFMCEYADETATIVEFLNRWITFCQSIISTLT |
| | | DLISNINVIVLEL | |
| | | KGSETTFMCEY | |
| | | ADETATIVEFLN | |
| | | RWITFCQSIISTL | |
| | | T | |
| | [symbol] 490 | | DKTHTCPPCPAPELLGGPSVFLFPPKPKDTLMISRTPEVTCVVVDVSHEDPEVKFN |
| | | | WYVDGVEVHNAKTKPREEQYASTYRVVSVLTVLHQDWLNGKEYKCKVSNKALP |
| | | | APIEKTISKAKGQPREPQVCTLPPSRDELTKNQVSLSCAVKGFYPSDIAVEWESNG |
| | | | QPENNYKTTPPVLDSDGSFFLVSKLTVDKSRWQQGNVFSCSVMHEALHNHYTQ |
| | | | KSLSLSPG |
| | [symbol] 490 | APTSSSTKKTQL | DKTHTCPPCPAPELLGGPSVFLFPPKPKDTLMISRTPEVTCVVVDVSHEDPEVKFN |
| | | QLEHLCLLLQMI | WYVDGVEVHNAKTKPREEQYASTYRVVSVLTVLHQDWLNGKEYKCKVSNKALP |
| | | LNGINNYKNPKL | APIEKTISKAKGQPREPQVYTLPPCRDELTKNQVSLWCLVKGFYPSDIAVEWESN |
| | | TAMLTAKFAMP | GQPENNYKTTPPVLDSDGSFFLYSKLTVDKSRWQQGNVFSCSVMHEALHNHYT |
| | | KKATELKHLQCL | QKSLSLSPGGSPGVPLSLYSGPAPTSSSTKKTQLQLEHLCLLLQMILNGINNYKNPK |
| | | EEALKPLEEVLN | LTAMLTAKFAMPKKATELKHLQCLEEALKPLEEVLNLAQSKNFHLRPRDLISNINVI |
| | | LAQSKNFHLRPR | VLELKGSETTFMCEYADETATIVEFLNRWITFCQSIISTLT |
| | | DLISNINVIVLEL | |
| | | KGSETTFMCEY | |
| | | ADETATIVEFLN | |
| | | RWITFCQSIISTL | |
| | | T | |
| | [symbol] 491 | | DKTHTCPPCPAPELLGGPSVFLFPPKPKDTLMISRTPEVTCVVVDVSHEDPEVKFN |
| | | | WYVDGVEVHNAKTKPREEQYASTYRVVSVLTVLHQDWLNGKEYKCKVSNKALP |
| | | | APIEKTISKAKGQPREPQVCTLPPSRDELTKNQVSLSCAVKGFYPSDIAVEWESNG |
| | | | QPENNYKTTPPVLDSDGSFFLVSKLTVDKSRWQQGNVFSCSVMHEALHNHYTQ |
| | | | KSLSLSPG |
| | [symbol] 491 | APTSSSTKKTQL | DKTHTCPPCPAPELLGGPSVFLFPPKPKDTLMISRTPEVTCVVVDVSHEDPEVKFN |
| | | QLEYLCLLLQMI | WYVDGVEVHNAKTKPREEQYASTYRVVSVLTVLHQDWLNGKEYKCKVSNKALP |
| | | LNGINNYKNPKL | APIEKTISKAKGQPREPQVYTLPPCRDELTKNQVSLWCLVKGFYPSDIAVEWESN |
| | | TAMLTAKFAMP | GQPENNYKTTPPVLDSDGSFFLYSKLTVDKSRWQQGNVFSCSVMHEALHNHYT |
| | | KKATELKHLQCL | QKSLSLSPGGSPGVPLSLYSGPAPTSSSTKKTQLQLEYLCLLLQMILNGINNYKNPK |
| | | EEALKPLEEVLN | LTAMLTAKFAMPKKATELKHLQCLEEALKPLEEVLNLAQSKNFHLRPRDLISNINVI |
| | | LAQSKNFHLRPR | VLELKGSETTFMCEYADETATIVEFLNRWITFCQSIISTLT |
| | | DLISNINVIVLEL | |
| | | KGSETTFMCEY | |
| | | ADETATIVEFLN | |
| | | RWITFCQSIISTL | |
| | | T | |
| | [symbol] 492 | | DKTHTCPPCPAPELLGGPSVFLFPPKPKDTLMISRTPEVTCVVVDVSHEDPEVKFN |
| | | | WYVDGVEVHNAKTKPREEQYASTYRVVSVLTVLHQDWLNGKEYKCKVSNKALP |
| | | | APIEKTISKAKGQPREPQVCTLPPSRDELTKNQVSLSCAVKGFYPSDIAVEWESNG |
| | | | QPENNYKTTPPVLDSDGSFFLVSKLTVDKSRWQQGNVFSCSVMHEALHNHYTQ |
| | | | KSLSLSPG |
| | [symbol] 492 | APTSSSTKKTQL | DKTHTCPPCPAPELLGGPSVFLFPPKPKDTLMISRTPEVTCVVVDVSHEDPEVKFN |
| | | QLEELCLLLQMI | WYVDGVEVHNAKTKPREEQYASTYRVVSVLTVLHQDWLNGKEYKCKVSNKALP |
| | | LNGINNYKNPKL | APIEKTISKAKGQPREPQVYTLPPCRDELTKNQVSLWCLVKGFYPSDIAVEWESN |
| | | TAMLTAKFAMP | GQPENNYKTTPPVLDSDGSFFLYSKLTVDKSRWQQGNVFSCSVMHEALHNHYT |
| | | KKATELKHLQCL | QKSLSLSPGGSPGVPLSLYSGPAPTSSSTKKTQLQLEELCLLLQMILNGINNYKNPK |
| | | EEALKPLEEVLN | LTAMLTAKFAMPKKATELKHLQCLEEALKPLEEVLNLAQSKNFHLRPRDLISNINVI |
| | | LAQSKNFHLRPR | VLELKGSETTFMCEYADETATIVEFLNRWITFCQSIISTLT |
| | | DLISNINVIVLEL | |
| | | KGSETTFMCEY | |
| | | ADETATIVEFLN | |
| | | RWITFCQSIISTL | |
| | | T | |
| | [symbol] 493 | | DKTHTCPPCPAPELLGGPSVFLFPPKPKDTLMISRTPEVTCVVVDVSHEDPEVKFN |
| | | | WYVDGVEVHNAKTKPREEQYASTYRVVSVLTVLHQDWLNGKEYKCKVSNKALP |
| | | | APIEKTISKAKGQPREPQVCTLPPSRDELTKNQVSLSCAVKGFYPSDIAVEWESNG |
| | | | QPENNYKTTPPVLDSDGSFFLVSKLTVDKSRWQQGNVFSCSVMHEALHNHYTQ |
| | | | KSLSLSPGPGSGSAVNGTSQFTCFYNSRANISCVWSQDGALQDTSCQVHAWPDR |
| | | | RRWNQTCELLPVSQASWACNLILGAPDSQKLTTVDIVTLRVLCREGVRWRVMAI |
| | | | QDFKPFENLRLMAPISLQVVHVETHRCNISWEISQASHYFERHLEFEARTLSPGHT |
| | | | WEEAPLLTLKQKQEWICLETLTPDTQYEFQVRVKPLQGEFTTWSPWSQPLAFRT |
| | | | KPAALGKD |
| | [symbol] 493 | APTSSSTKKTQL | DKTHTCPPCPAPELLGGPSVFLFPPKPKDTLMISRTPEVTCVVVDVSHEDPEVKFN |
| | | QLEHLCLDLQM | WYVDGVEVHNAKTKPREEQYASTYRVVSVLTVLHQDWLNGKEYKCKVSNKALP |
| | | ILNGINNYKNPK | APIEKTISKAKGQPREPQVYTLPPCRDELTKNQVSLWCLVKGFYPSDIAVEWESN |
| | | LTAMLTAKFAM | GQPENNYKTTPPVLDSDGSFFLYSKLTVDKSRWQQGNVFSCSVMHEALHNHYT |
| | | PKKATELKHLQC | QKSLSLSPGGSPGVPLSLYSGPAPTSSSTKKTQLQLEHLCLDLQMILNGINNYKNPK |
| | | LEEALKPLEEVL | LTAMLTAKFAMPKKATELKHLQCLEEALKPLEEVLNLAQSKNFHLRPRDLISNINVI |
| | | NLAQSKNFHLR | VLELKGSETTFMCEYADETATIVEFLNRWITFCQSIISTLT |
| | | PRDLISNINVIVL | |
| | | ELKGSETTFMCE | |
| | | YADETATIVEFL | |
| | | NRWITFCQSIIST | |
| | | LT | |
| | [symbol] 494 | | DKTHTCPPCPAPELLGGPSVFLFPPKPKDTLMISRTPEVTCVVVDVSHEDPEVKFN |
| | | | WYVDGVEVHNAKTKPREEQYASTYRVVSVLTVLHQDWLNGKEYKCKVSNKALP |
| | | | APIEKTISKAKGQPREPQVCTLPPSRDELTKNQVSLSCAVKGFYPSDIAVEWESNG |
| | | | QPENNYKTTPPVLDSDGSFFLVSKLTVDKSRWQQGNVFSCSVMHEALHNHYTQ |
| | | | KSLSLSPGPGSGSAVNGTSQFTCFYNSRANISCVWSQDGALQDTSCQVHAWPDR |
| | | | RRWNQTCELLPVSQASWACNLILGAPDSQKLTTVDIVTLRVLCREGVRWRVMAI |
| | | | QDFKPFENLRLMAPISLQVVHVETHRCNISWEISQASHYFERHLEFEARTLSPGHT |
| | | | WEEAPLLTLKQKQEWICLETLTPDTQYEFQVRVKPLQGEFTTWSPWSQPLAFRT |
| | | | KPAALGKD |
| | [symbol] 494 | APTSSSTKKTQL | DKTHTCPPCPAPELLGGPSVFLFPPKPKDTLMISRTPEVTCVVVDVSHEDPEVKFN |
| | | QLEYLLLDLQMI | WYVDGVEVHNAKTKPREEQYASTYRVVSVLTVLHQDWLNGKEYKCKVSNKALP |
| | | LNGINNYKNPKL | APIEKTISKAKGQPREPQVYTLPPCRDELTKNQVSLWCLVKGFYPSDIAVEWESN |
| | | TAMLTAKFAMP | GQPENNYKTTPPVLDSDGSFFLYSKLTVDKSRWQQGNVFSCSVMHEALHNHYT |
| | | KKATELKHLQCL | QKSLSLSPGGSPGVPLSLYSGPAPTSSSTKKTQLQLEYLLLDLQMILNGINNYKNPK |
| | | EEALKPLEEVLN | LTAMLTAKFAMPKKATELKHLQCLEEALKPLEEVLNLAQSKNFHLRPRDLISNINVI |
| | | LAQSKNFHLRPR | VLELKGSETTFMCEYADETATIVEFLNRWITFAQSIISTLT |
| | | DLISNINVIVLEL | |
| | | KGSETTFMCEY | |
| | | ADETATIVEFLN | |
| | | RWITFAQSIISTL | |
| | | T | |
| | [symbol] 495 | | DKTHTCPPCPAPELLGGPSVFLFPPKPKDTLMISRTPEVTCVVVDVSHEDPEVKFN |
| | | | WYVDGVEVHNAKTKPREEQYASTYRVVSVLTVLHQDWLNGKEYKCKVSNKALP |
| | | | APIEKTISKAKGQPREPQVCTLPPSRDELTKNQVSLSCAVKGFYPSDIAVEWESNG |
| | | | QPENNYKTTPPVLDSDGSFFLVSKLTVDKSRWQQGNVFSCSVMHEALHNHYTQ |
| | | | KSLSLSPGPGSGSAVNGTSQFTCFYNSRANISCVWSQDGALQDTSCQVHAWPDR |
| | | | RRWNQTCELLPVSQASWACNLILGAPDSQKLTTVDIVTLRVLCREGVRWRVMAI |
| | | | QDFKPFENLRLMAPISLQVVHVETHRCNISWEISQASHYFERHLEFEARTLSPGHT |
| | | | WEEAPLLTLKQKQEWICLETLTPDTQYEFQVRVKPLQGEFTTWSPWSQPLAFRT |
| | | | KPAALGKD |
| | [symbol] 495 | APTSSSTKKTQL | DKTHTCPPCPAPELLGGPSVFLFPPKPKDTLMISRTPEVTCVVVDVSHEDPEVKFN |
| | | QLEELLLDLQMI | WYVDGVEVHNAKTKPREEQYASTYRVVSVLTVLHQDWLNGKEYKCKVSNKALP |
| | | LNGINNYKNPKL | APIEKTISKAKGQPREPQVYTLPPCRDELTKNQVSLWCLVKGFYPSDIAVEWESN |
| | | TAMLTAKFAMP | GQPENNYKTTPPVLDSDGSFFLYSKLTVDKSRWQQGNVFSCSVMHEALHNHYT |
| | | KKATELKHLQCL | QKSLSLSPGGSPGVPLSLYSGPAPTSSSTKKTQLQLEELLLDLQMILNGINNYKNPK |
| | | EEALKPLEEVLN | LTAMLTAKFAMPKKATELKHLQCLEEALKPLEEVLNLAQSKNFHLRPRDLISNINVI |
| | | LAQSKNFHLRPR | VLELKGSETTFMCEYADETATIVEFLNRWITFAQSIISTLT |
| | | DLISNINVIVLEL | |
| | | KGSETTFMCEY | |
| | | ADETATIVEFLN | |
| | | RWITFAQSIISTL | |
| | | T | |
| | [symbol] 496 | | DKTHTCPPCPAPELLGGPSVFLFPPKPKDTLMISRTPEVTCVVVDVSHEDPEVKFN |
| | | | WYVDGVEVHNAKTKPREEQYASTYRVVSVLTVLHQDWLNGKEYKCKVSNKALP |
| | | | APIEKTISKAKGQPREPQVCTLPPSRDELTKNQVSLSCAVKGFYPSDIAVEWESNG |
| | | | QPENNYKTTPPVLDSDGSFFLVSKLTVDKSRWQQGNVFSCSVMHEALHNHYTQ |
| | | | KSLSLSPGPGSGSAVNGTSQFTCFYNSRANISCVWSQDGALQDTSCQVHAWPDR |
| | | | RRWNQTCELLPVSQASWACNLILGAPDSQKLTTVDIVTLRVLCREGVRWRVMAI |
| | | | QDFKPFENLRLMAPISLQVVHVETHRCNISWEISQASHYFERHLEFEARTLSPGHT |
| | | | WEEAPLLTLKQKQEWICLETLTPDTQYEFQVRVKPLQGEFTTWSPWSQPLAFRT |
| | | | KPAALGKD |
| | [symbol] 496 | APTSSSTKKTQL | DKTHTCPPCPAPELLGGPSVFLFPPKPKDTLMISRTPEVTCVVVDVSHEDPEVKFN |
| | | QLEHLLLLLQMI | WYVDGVEVHNAKTKPREEQYASTYRVVSVLTVLHQDWLNGKEYKCKVSNKALP |
| | | LNGINNYKNPKL | APIEKTISKAKGQPREPQVYTLPPCRDELTKNQVSLWCLVKGFYPSDIAVEWESN |
| | | TAMLTAKFAMP | GQPENNYKTTPPVLDSDGSFFLYSKLTVDKSRWQQGNVFSCSVMHEALHNHYT |
| | | KKATELKHLQCL | QKSLSLSPGGSPGVPLSLYSGPAPTSSSTKKTQLQLEHLLLLLQMILNGINNYKNPK |
| | | EEALKPLEEVLN | LTAMLTAKFAMPKKATELKHLQCLEEALKPLEEVLNLAQSKNFHLRPRDLISNINVI |
| | | LAQSKNFHLRPR | VLELKGSETTFMCEYADETATIVEFLNRWITFAQSIISTLT |
| | | DLISNINVIVLEL | |
| | | KGSETTFMCEY | |
| | | ADETATIVEFLN | |
| | | RWITFAQSIISTL | |
| | | T | |
| | [symbol] 497 | | DKTHTCPPCPAPELLGGPSVFLFPPKPKDTLMISRTPEVTCVVVDVSHEDPEVKFN |
| | | | WYVDGVEVHNAKTKPREEQYASTYRVVSVLTVLHQDWLNGKEYKCKVSNKALP |
| | | | APIEKTISKAKGQPREPQVCTLPPSRDELTKNQVSLSCAVKGFYPSDIAVEWESNG |
| | | | QPENNYKTTPPVLDSDGSFFLVSKLTVDKSRWQQGNVFSCSVMHEALHNHYTQ |
| | | | KSLSLSPGPGSGSAVNGTSQFTCFYNSRANISCVWSQDGALQDTSCQVHAWPDR |
| | | | RRWNQTCELLPVSQASWACNLILGAPDSQKLTTVDIVTLRVLCREGVRWRVMAI |
| | | | QDFKPFENLRLMAPISLQVVHVETHRCNISWEISQASHYFERHLEFEARTLSPGHT |
| | | | WEEAPLLTLKQKQEWICLETLTPDTQYEFQVRVKPLQGEFTTWSPWSQPLAFRT |
| | | | KPAALGKD |
| | [symbol] 497 | APTSSSTKKTQL | DKTHTCPPCPAPELLGGPSVFLFPPKPKDTLMISRTPEVTCVVVDVSHEDPEVKFN |
| | | QLEYLCLDLQMI | WYVDGVEVHNAKTKPREEQYASTYRVVSVLTVLHQDWLNGKEYKCKVSNKALP |
| | | LNGINNYKNPKL | APIEKTISKAKGQPREPQVYTLPPCRDELTKNQVSLWCLVKGFYPSDIAVEWESN |
| | | TAMLTAKFAMP | GQPENNYKTTPPVLDSDGSFFLYSKLTVDKSRWQQGNVFSCSVMHEALHNHYT |
| | | KKATELKHLQCL | QKSLSLSPGGSPGVPLSLYSGPAPTSSSTKKTQLQLEYLCLDLQMILNGINNYKNPK |
| | | EEALKPLEEVLN | LTAMLTAKFAMPKKATELKHLQCLEEALKPLEEVLNLAQSKNFHLRPRDLISNINVI |
| | | LAQSKNFHLRPR | VLELKGSETTFMCEYADETATIVEFLNRWITFCQSIISTLT |
| | | DLISNINVIVLEL | |
| | | KGSETTFMCEY | |
| | | ADETATIVEFLN | |
| | | RWITFCQSIISTL | |
| | | T | |
| | [symbol] 498 | | DKTHTCPPCPAPELLGGPSVFLFPPKPKDTLMISRTPEVTCVVVDVSHEDPEVKFN |
| | | | WYVDGVEVHNAKTKPREEQYASTYRVVSVLTVLHQDWLNGKEYKCKVSNKALP |
| | | | APIEKTISKAKGQPREPQVCTLPPSRDELTKNQVSLSCAVKGFYPSDIAVEWESNG |
| | | | QPENNYKTTPPVLDSDGSFFLVSKLTVDKSRWQQGNVFSCSVMHEALHNHYTQ |
| | | | KSLSLSPGPGSGSAVNGTSQFTCFYNSRANISCVWSQDGALQDTSCQVHAWPDR |
| | | | RRWNQTCELLPVSQASWACNLILGAPDSQKLTTVDIVTLRVLCREGVRWRVMAI |
| | | | QDFKPFENLRLMAPISLQVVHVETHRCNISWEISQASHYFERHLEFEARTLSPGHT |
| | | | WEEAPLLTLKQKQEWICLETLTPDTQYEFQVRVKPLQGEFTTWSPWSQPLAFRT |
| | | | KPAALGKD |
| | [symbol] 498 | APTSSSTKKTQL | DKTHTCPPCPAPELLGGPSVFLFPPKPKDTLMISRTPEVTCVVVDVSHEDPEVKFN |
| | | QLEELCLDLQMI | WYVDGVEVHNAKTKPREEQYASTYRVVSVLTVLHQDWLNGKEYKCKVSNKALP |
| | | LNGINNYKNPKL | APIEKTISKAKGQPREPQVYTLPPCRDELTKNQVSLWCLVKGFYPSDIAVEWESN |
| | | TAMLTAKFAMP | GQPENNYKTTPPVLDSDGSFFLYSKLTVDKSRWQQGNVFSCSVMHEALHNHYT |
| | | KKATELKHLQCL | QKSLSLSPGGSPGVPLSLYSGPAPTSSSTKKTQLQLEELCLDLQMILNGINNYKNPK |
| | | EEALKPLEEVLN | LTAMLTAKFAMPKKATELKHLQCLEEALKPLEEVLNLAQSKNFHLRPRDLISNINVI |
| | | LAQSKNFHLRPR | VLELKGSETTFMCEYADETATIVEFLNRWITFCQSIISTLT |
| | | DLISNINVIVLEL | |
| | | KGSETTFMCEY | |
| | | ADETATIVEFLN | |
| | | RWITFCQSIISTL | |
| | | T | |
| | [symbol] 499 | | DKTHTCPPCPAPELLGGPSVFLFPPKPKDTLMISRTPEVTCVVVDVSHEDPEVKFN |
| | | | WYVDGVEVHNAKTKPREEQYASTYRVVSVLTVLHQDWLNGKEYKCKVSNKALP |
| | | | APIEKTISKAKGQPREPQVCTLPPSRDELTKNQVSLSCAVKGFYPSDIAVEWESNG |
| | | | QPENNYKTTPPVLDSDGSFFLVSKLTVDKSRWQQGNVFSCSVMHEALHNHYTQ |
| | | | KSLSLSPGPGSGSAVNGTSQFTCFYNSRANISCVWSQDGALQDTSCQVHAWPDR |
| | | | RRWNQTCELLPVSQASWACNLILGAPDSQKLTTVDIVTLRVLCREGVRWRVMAI |
| | | | QDFKPFENLRLMAPISLQVVHVETHRCNISWEISQASHYFERHLEFEARTLSPGHT |
| | | | WEEAPLLTLKQKQEWICLETLTPDTQYEFQVRVKPLQGEFTTWSPWSQPLAFRT |
| | | | KPAALGKD |
| | [symbol] 499 | APTSSSTKKTQL | DKTHTCPPCPAPELLGGPSVFLFPPKPKDTLMISRTPEVTCVVVDVSHEDPEVKFN |
| | | QLEHLCLLLQMI | WYVDGVEVHNAKTKPREEQYASTYRVVSVLTVLHQDWLNGKEYKCKVSNKALP |
| | | LNGINNYKNPKL | APIEKTISKAKGQPREPQVYTLPPCRDELTKNQVSLWCLVKGFYPSDIAVEWESN |
| | | TAMLTAKFAMP | GQPENNYKTTPPVLDSDGSFFLYSKLTVDKSRWQQGNVFSCSVMHEALHNHYT |
| | | KKATELKHLQCL | QKSLSLSPGGSPGVPLSLYSGPAPTSSSTKKTQLQLEHLCLLLQMILNGINNYKNPK |
| | | EEALKPLEEVLN | LTAMLTAKFAMPKKATELKHLQCLEEALKPLEEVLNLAQSKNFHLRPRDLISNINVI |
| | | LAQSKNFHLRPR | VLELKGSETTFMCEYADETATIVEFLNRWITFCQSIISTLT |
| | | DLISNINVIVLEL | |
| | | KGSETTFMCEY | |
| | | ADETATIVEFLN | |
| | | RWITFCQSIISTL | |
| | | T | |
| | [symbol] 500 | | DKTHTCPPCPAPELLGGPSVFLFPPKPKDTLMISRTPEVTCVVVDVSHEDPEVKFN |
| | | | WYVDGVEVHNAKTKPREEQYASTYRVVSVLTVLHQDWLNGKEYKCKVSNKALP |
| | | | APIEKTISKAKGQPREPQVCTLPPSRDELTKNQVSLSCAVKGFYPSDIAVEWESNG |
| | | | QPENNYKTTPPVLDSDGSFFLVSKLTVDKSRWQQGNVFSCSVMHEALHNHYTQ |
| | | | KSLSLSPGPGSGSAVNGTSQFTCFYNSRANISCVWSQDGALQDTSCQVHAWPDR |
| | | | RRWNQTCELLPVSQASWACNLILGAPDSQKLTTVDIVTLRVLCREGVRWRVMAI |
| | | | QDFKPFENLRLMAPISLQVVHVETHRCNISWEISQASHYFERHLEFEARTLSPGHT |
| | | | WEEAPLLTLKQKQEWICLETLTPDTQYEFQVRVKPLQGEFTTWSPWSQPLAFRT |
| | | | KPAALGKD |
| | [symbol] 500 | APTSSSTKKTQL | DKTHTCPPCPAPELLGGPSVFLFPPKPKDTLMISRTPEVTCVVVDVSHEDPEVKFN |
| | | QLEYLCLLLQMI | WYVDGVEVHNAKTKPREEQYASTYRVVSVLTVLHQDWLNGKEYKCKVSNKALP |
| | | LNGINNYKNPKL | APIEKTISKAKGQPREPQVYTLPPCRDELTKNQVSLWCLVKGFYPSDIAVEWESN |
| | | TAMLTAKFAMP | GQPENNYKTTPPVLDSDGSFFLYSKLTVDKSRWQQGNVFSCSVMHEALHNHYT |
| | | KKATELKHLQCL | QKSLSLSPGGSPGVPLSLYSGPAPTSSSTKKTQLQLEYLCLLLQMILNGINNYKNPK |
| | | EEALKPLEEVLN | LTAMLTAKFAMPKKATELKHLQCLEEALKPLEEVLNLAQSKNFHLRPRDLISNINVI |
| | | LAQSKNFHLRPR | VLELKGSETTFMCEYADETATIVEFLNRWITFCQSIISTLT |
| | | DLISNINVIVLEL | |
| | | KGSETTFMCEY | |
| | | ADETATIVEFLN | |
| | | RWITFCQSIISTL | |
| | | T | |
| | [symbol] 501 | | DKTHTCPPCPAPELLGGPSVFLFPPKPKDTLMISRTPEVTCVVVDVSHEDPEVKFN |
| | | | WYVDGVEVHNAKTKPREEQYASTYRVVSVLTVLHQDWLNGKEYKCKVSNKALP |
| | | | APIEKTISKAKGQPREPQVCTLPPSRDELTKNQVSLSCAVKGFYPSDIAVEWESNG |
| | | | QPENNYKTTPPVLDSDGSFFLVSKLTVDKSRWQQGNVFSCSVMHEALHNHYTQ |
| | | | KSLSLSPGPGSGSAVNGTSQFTCFYNSRANISCVWSQDGALQDTSCQVHAWPDR |
| | | | RRWNQTCELLPVSQASWACNLILGAPDSQKLTTVDIVTLRVLCREGVRWRVMAI |
| | | | QDFKPFENLRLMAPISLQVVHVETHRCNISWEISQASHYFERHLEFEARTLSPGHT |
| | | | WEEAPLLTLKQKQEWICLETLTPDTQYEFQVRVKPLQGEFTTWSPWSQPLAFRT |
| | | | KPAALGKD |
| | [symbol] 501 | APTSSSTKKTQL | DKTHTCPPCPAPELLGGPSVFLFPPKPKDTLMISRTPEVTCVVVDVSHEDPEVKFN |
| | | QLEELCLLLQMI | WYVDGVEVHNAKTKPREEQYASTYRVVSVLTVLHQDWLNGKEYKCKVSNKALP |
| | | LNGINNYKNPKL | APIEKTISKAKGQPREPQVYTLPPCRDELTKNQVSLWCLVKGFYPSDIAVEWESN |
| | | TAMLTAKFAMP | GQPENNYKTTPPVLDSDGSFFLYSKLTVDKSRWQQGNVFSCSVMHEALHNHYT |
| | | KKATELKHLQCL | QKSLSLSPGGSPGVPLSLYSGPAPTSSSTKKTQLQLEELCLLLQMILNGINNYKNPK |
| | | EEALKPLEEVLN | LTAMLTAKFAMPKKATELKHLQCLEEALKPLEEVLNLAQSKNFHLRPRDLISNINVI |
| | | LAQSKNFHLRPR | VLELKGSETTFMCEYADETATIVEFLNRWITFCQSIISTLT |
| | | DLISNINVIVLEL | |
| | | KGSETTFMCEY | |
| | | ADETATIVEFLN | |
| | | RWITFCQSIISTL | |
| | | T | |
| | [symbol] 502 | AVNGTSQFTCF | DKTHTCPPCPAPELLGGPSVFLFPPKPKDTLMISRTPEVTCVVVDVSHEDPEVKFN |
| | | YNSRANISCVW | WYVDGVEVHNAKTKPREEQYASTYRVVSVLTVLHQDWLNGKEYKCKVSNKALP |
| | | SQDGALQDTSC | APIEKTISKAKGQPREPQVCTLPPSRDELTKNQVSLSCAVKGFYPSDIAVEWESNG |
| | | QVHAWPDRRR | QPENNYKTTPPVLDSDGSFFLVSKLTVDKSRWQQGNVFSCSVMHEALHNHYTQ |
| | | WNQTCELLPVS | KSLSLSPGGPPSGSSPGVPLSLYGSGGGAVNGTSQFTCFYNSRANISCVWSQDGA |
| | | QASWACNLILG | LQDTSCQVHAWPDRRRWNQTCELLPVSQASWACNLILGAPDSQKLTTVDIVTL |
| | | APDSQKLTTVDI | RVLCREGVRWRVMAIQDFKPFENLRLMAPISLQVVHVETHRCNISWEISQASHY |
| | | VTLRVLCREGVR | FERHLEFEARTLSPGHTWEEAPLLTLKQKQEWICLETLTPDTQYEFQVRVKPLQG |
| | | WRVMAIQDFK | EFTTWSPWSQPLAFRTKPAALGKD |
| | | PFENLRLMAPIS | |
| | | LQVVHVETHRC | |
| | | NISWEISQASHY | |
| | | FERHLEFEARTL | |
| | | SPGHTWEEAPL | |
| | | LTLKQKQEWICL | |
| | | ETLTPDTQYEFQ | |
| | | VRVKPLQGEFTT | |
| | | WSPWSQPLAFR | |
| | | TKPAALGKD | |
| | [symbol] 502 | | DKTHTCPPCPAPELLGGPSVFLFPPKPKDTLMASRTPEVTCVVVDVSHEDPEVKF |
| | | | NWYVDGVEVHNAKTKPREEQYASTYRVVSVLTVLHQDWLNGKEYKCKVSNKAL |
| | | | PAPIEKTISKAKGQPREPQVYTLPPCRDELTKNQVSLWCLVKGFYPSDIAVEWESN |
| | | | GQPENNYKTTPPVLDSDGSFFLYSKLTVDKSRWQQGNVFSCSVMHEALHNHYT |
| | | | QKSLSLSPGGGSSPPGGGSSGGGSGPAPTSSSTKKTQLQLEHLLLDLQMILNGINN |
| | | | YKNPKLTAMLTAKFAMPKKATELKHLQCLEEALKPLEEVLNLAQSKNFHLRPRDLI |
| | | | SNINVIVLELKGSETTFMCEYADETATIVEFLNRWITFAQSIISTLT |
| | [symbol] 503 | | DKTHTCPPCPAPELLGGPSVFLFPPKPKDTLMISRTPEVTCVVVDVSHEDPEVKFN |
| | | | WYVDGVEVHNAKTKPREEQYASTYRVVSVLTVLHQDWLNGKEYKCKVSNKALP |
| | | | APIEKTISKAKGQPREPQVYTLPPCRDELTKNQVSLWCLVKGFYPSDIAVEWESN |
| | | | GQPENNYKTTPPVLDSDGSFFLYSKLTVDKSRWQQGNVFSCSVMHEALHNHYT |
| | | | QKSLSLSPGGGSSPPGGGSSGGGSGPAPTSSSTKKTQLQLEHLLLDLQMILNGINN |
| | | | YKNPKLTAMLTAKFAMPKKATELKHLQCLEEALKPLEEVLNLAQSKNFHLRPRDLI |
| | | | SNINVIVLELKGSETTFMCEYADETATIVEFLNRWITFAQSIISTLT |
| | [symbol] 503 | AVNGTSQFTCF | DKTHTCPPCPAPELLGGPSVFLFPPKPKDTLMISRTPEVTCVVVDVSHEDPEVKFN |
| | | YNSRANISCVW | WYVDGVEVHNAKTKPREEQYASTYRVVSVLTVLHQDWLNGKEYKCKVSNKALP |
| | | SQDGALQDTSC | APIEKTISKAKGQPREPQVCTLPPSRDELTKNQVSLSCAVKGFYPSDIAVEWESNG |
| | | QVHAWPDRRR | QPENNYKTTPPVLDSDGSFFLVSKLTVDKSRWQQGNVFSCSVMHEALHNHYTQ |
| | | WNQTCELLPVS | KSLSLSPGGPPSGSSPRAAAVKSPSGGGAVNGTSQFTCFYNSRANISCVWSQDGA |
| | | QASWACNLILG | LQDTSCQVHAWPDRRRWNQTCELLPVSQASWACNLILGAPDSQKLTTVDIVTL |
| | | APDSQKLTTVDI | RVLCREGVRWRVMAIQDFKPFENLRLMAPISLQVVHVETHRCNISWEISQASHY |
| | | VTLRVLCREGVR | FERHLEFEARTLSPGHTWEEAPLLTLKQKQEWICLETLTPDTQYEFQVRVKPLQG |
| | | WRVMAIQDFK | EFTTWSPWSQPLAFRTKPAALGKD |
| | | PFENLRLMAPIS | |
| | | LQVVHVETHRC | |
| | | NISWEISQASHY | |
| | | FERHLEFEARTL | |
| | | SPGHTWEEAPL | |
| | | LTLKQKQEWICL | |
| | | ETLTPDTQYEFQ | |
| | | VRVKPLQGEFTT | |
| | | WSPWSQPLAFR | |
| | | TKPAALGKD | |
| | [symbol] 504 | | ESKYGPPCPPCPAPEFLGGPSVFLFPPKPKDTLMISRTPEVTCVVVDVSQEDPEVQ |
| | | | FNWYVDGVEVHNAKTKPREEQFNSTYRVVSVLTVLHQDWLNGKEYKCKVSNKG |
| | | | LPSSIEKTISKAKGQPREPQVCTLPPSQEEMTKNQVSLSCAVKGFYPSDIAVEWES |
| | | | NGQPENNYKTTPPVLDSDGSFFLYSRLTVDKSRWQEGNVFSCSVMHEALHNHYT |
| | | | QKSLSLSLGPGSGSAVNGTSQFTCFYNSRANISCVWSQDGALQDTSCQVHAWP |
| | | | DRRRWNQTCELLPVSQASWACNLILGAPDSQKLTTVDIVTLRVLCREGVRWRV |
| | | | MAIQDFKPFENLRLMAPISLQVVHVETHRCNISWEISQASHYFERHLEFEARTLSP |
| | | | GHTWEEAPLLTLKQKQEWICLETLTPDTQYEFQVRVKPLQGEFTTWSPWSQPLA |
| | | | FRTKPAALGKD |
| | [symbol] 504 | APTSSSTKKTQL | ESKYGPPCPPCPAPEFLGGPSVFLFPPKPKDTLMISRTPEVTCVVVDVSQEDPEVQ |
| | | QLEHLLLDLQMI | FNWYVDGVEVHNAKTKPREEQFNSTYRVVSVLTVLHQDWLNGKEYKCKVSNKG |
| | | LNGINNYKNPKL | LPSSIEKTISKAKGQPREPQVYTLPPCQEEMTKNQVSLWCLVKGFYPSDIAVEWES |
| | | TAMLTAKFAMP | NGQPENNYKTTPPVLDSDGSFFLYSRLTVDKSRWQEGNVFSCSVMHEALHNHYT |
| | | KKATELKHLQCL | QKSLSLSLGGSPGVPLSLYSGPAPTSSSTKKTQLQLEHLLLDLQMILNGINNYKNPK |
| | | EEALKPLEEVLN | LTAMLTAKFAMPKKATELKHLQCLEEALKPLEEVLNLAQSKNFHLRPRDLISNINVI |
| | | LAQSKNFHLRPR | VLELKGSETTFMCEYADETATIVEFLNRWITFAQSIISTLT |
| | | DLISNINVIVLEL | |
| | | KGSETTFMCEY | |
| | | ADETATIVEFLN | |
| | | RWITFAQSIISTL | |
| | | T | |
| | [symbol] 505 | | ESKYGPPCPPCPAPEFLGGPSVFLFPPKPKDTLMISRTPEVTCVVVDVSQEDPEVQ |
| | | | FNWYVDGVEVHNAKTKPREEQFNSTYRVVSVLTVLHQDWLNGKEYKCKVSNKG |
| | | | LPSSIEKTISKAKGQPREPQVCTLPPSQEEMTKNQVSLSCAVKGFYPSDIAVEWES |
| | | | NGQPENNYKTTPPVLDSDGSFFLYSRLTVDKSRWQEGNVFSCSVMHEALHNHYT |
| | | | QKSLSLSLGPGSGSAVNGTSQFTCFYNSRANISCVWSQDGALQDTSCQVHAWP |
| | | | DRRRWNQTCELLPVSQASWACNLILGAPDSQKLTTVDIVTLRVLCREGVRWRV |
| | | | MAIQDFKPFENLRLMAPISLQVVHVETHRCNISWEISQASHYFERHLEFEARTLSP |
| | | | GHTWEEAPLLTLKQKQEWICLETLTPDTQYEFQVRVKPLQGEFTTWSPWSQPLA |
| | | | FRTKPAALGKD |
| | [symbol] 505 | | ESKYGPPCPPCPAPEFLGGPSVFLFPPKPKDTLMISRTPEVTCVVVDVSQEDPEVQ |
| | | | FNWYVDGVEVHNAKTKPREEQFNSTYRVVSVLTVLHQDWLNGKEYKCKVSNKG |
| | | | LPSSIEKTISKAKGQPREPQVYTLPPCQEEMTKNQVSLWCLVKGFYPSDIAVEWES |
| | | | NGQPENNYKTTPPVLDSDGSFFLYSRLTVDKSRWQEGNVFSCSVMHEALHNHYT |
| | | | QKSLSLSLGGGSSPPGGGSSGGGSGPAPTSSSTKKTQLQLEHLLLDLQMILNGINN |
| | | | YKNPKLTAMLTAKFAMPKKATELKHLQCLEEALKPLEEVLNLAQSKNFHLRPRDLI |
| | | | SNINVIVLELKGSETTFMCEYADETATIVEFLNRWITFAQSIISTLT |
| | [symbol] 508 | | DKTHTCPPCPAPELLGGPSVFLFPPKPKDTLMASRTPEVTCVVVDVSHEDPEVKF |
| | | | NWYVDGVEVHNAKTKPREEQYASTYRVVSVLTVLHQDWLNGKEYKCKVSNKAL |
| | | | PAPIEKTISKAKGQPREPQVYTLPPCRDELTKNQVSLWCLVKGFYPSDIAVEWESN |
| | | | GQPENNYKTTPPVLDSDGSFFLYSKLTVDKSRWQQGNVFSCSVMHEALHNHYT |
| | | | QKSLSLSPGGGSSPPGGGSSGGGSGPAPTSSSTKKTQLQLEHLLLDLQMILNGINN |
| | | | YKNPKLTAMLTAKFAMPKKATELKHLQCLEEALKPLEEVLNLAQSKNFHLRPRDLI |
| | | | SNINVIVLELKGSETTFMCEYADETATIVEFLNRWITFAQSIISTLT |
| | [symbol] 508 | AVNGTSQFTCF | DKTHTCPPCPAPELLGGPSVFLFPPKPKDTLMASRTPEVTCVVVDVSHEDPEVKF |
| | | YNSRANISCVW | NWYVDGVEVHNAKTKPREEQYASTYRVVSVLTVLHQDWLNGKEYKCKVSNKAL |
| | | SQDGALQDTSC | PAPIEKTISKAKGQPREPQVCTLPPSRDELTKNQVSLSCAVKGFYPSDIAVEWESN |
| | | QVHAWPDRRR | GQPENNYKTTPPVLDSDGSFFLVSKLTVDKSRWQQGNVFSCSVMHEALHNHYT |
| | | WNQTCELLPVS | QKSLSLSPGGPPSGSSPGVPLSLYGSGGGAVNGTSQFTCFYNSRANISCVWSQDG |
| | | QASWACNLILG | ALQDTSCQVHAWPDRRRWNQTCELLPVSQASWACNLILGAPDSQKLTTVDIVT |
| | | APDSQKLTTVDI | LRVLCREGVRWRVMAIQDFKPFENLRLMAPISLQVVHVETHRCNISWEISQASH |
| | | VTLRVLCREGVR | YFERHLEFEARTLSPGHTWEEAPLLTLKQKQEWICLETLTPDTQYEFQVRVKPLQ |
| | | WRVMAIQDFK | GEFTTWSPWSQPLAFRTKPAALGKD |
| | | PFENLRLMAPIS | |
| | | LQVVHVETHRC | |
| | | NISWEISQASHY | |
| | | FERHLEFEARTL | |
| | | SPGHTWEEAPL | |
| | | LTLKQKQEWICL | |
| | | ETLTPDTQYEFQ | |
| | | VRVKPLQGEFTT | |
| | | WSPWSQPLAFR | |
| | | TKPAALGKD | |
| | [symbol] 509 | | DKTHTCPPCPAPELLGGPSVFLFPPKPKDTLMASRTPEVTCVVVDVSHEDPEVKF |
| | | | NWYVDGVEVHNAKTKPREEQYASTYRVVSVLTVLHQDWLNGKEYKCKVSNKAL |
| | | | PAPIEKTISKAKGQPREPQVCTLPPSRDELTKNQVSLSCAVKGFYPSDIAVEWESN |
| | | | GQPENNYKTTPPVLDSDGSFFLVSKLTVDKSRWQQGNVFSCSVMHEALHNHYT |
| | | | QKSLSLSPGPGSGSAVNGTSQFTCFYNSRANISCVWSQDGALQDTSCQVHAWP |
| | | | DRRRWNQTCELLPVSQASWACNLILGAPDSQKLTTVDIVTLRVLCREGVRWRV |
| | | | MAIQDFKPFENLRLMAPISLQVVHVETHRCNISWEISQASHYFERHLEFEARTLSP |
| | | | GHTWEEAPLLTLKQKQEWICLETLTPDTQYEFQVRVKPLQGEFTTWSPWSQPLA |
| | | | FRTKPAALGKD |
| | [symbol] 509 | APTSSSTKKTQL | DKTHTCPPCPAPELLGGPSVFLFPPKPKDTLMASRTPEVTCVVVDVSHEDPEVKF |
| | | QLEHLLLDLQMI | NWYVDGVEVHNAKTKPREEQYASTYRVVSVLTVLHQDWLNGKEYKCKVSNKAL |
| | | LNGINNYKNPKL | PAPIEKTISKAKGQPREPQVYTLPPCRDELTKNQVSLWCLVKGFYPSDIAVEWESN |
| | | TAMLTAKFAMP | GQPENNYKTTPPVLDSDGSFFLYSKLTVDKSRWQQGNVFSCSVMHEALHNHYT |
| | | KKATELKHLQCL | QKSLSLSPGGGSSPPMPYDLYHPSGPAPTSSSTKKTQLQLEHLLLDLQMILNGINN |
| | | EEALKPLEEVLN | YKNPKLTAMLTAKFAMPKKATELKHLQCLEEALKPLEEVLNLAQSKNFHLRPRDLI |
| | | LAQSKNFHLRPR | SNINVIVLELKGSETTFMCEYADETATIVEFLNRWITFAQSIISTLT |
| | | DLISNINVIVLEL | |
| | | KGSETTFMCEY | |
| | | ADETATIVEFLN | |
| | | RWITFAQSIISTL | |
| | | T | |
| | [symbol] 510 | | DKTHTCPPCPAPELLGGPSVFLFPPKPKDTLMASRTPEVTCVVVDVSHEDPEVKF |
| | | | NWYVDGVEVHNAKTKPREEQYASTYRVVSVLTVLHQDWLNGKEYKCKVSNKAL |
| | | | PAPIEKTISKAKGQPREPQVYTLPPCRDELTKNQVSLWCLVKGFYPSDIAVEWESN |
| | | | GQPENNYKTTPPVLDSDGSFFLYSKLTVDKSRWQQGNVFSCSVMHEALHNHYT |
| | | | QKSLSLSPGGGSSPPGGGSSGGGSGPAPTSSSTKKTQLQLEHLLLDLQMILNGINN |
| | | | YKNPKLTAMLTAKFAMPKKATELKHLQCLEEALKPLEEVLNLAQSKNFHLRPRDLI |
| | | | SNINVIVLELKGSETTFMCEYADETATIVEFLNRWITFAQSIISTLT |
| | [symbol] 510 | AVNGTSQFTCF | DKTHTCPPCPAPELLGGPSVFLFPPKPKDTLMASRTPEVTCVVVDVSHEDPEVKF |
| | | YNSRANISCVW | NWYVDGVEVHNAKTKPREEQYASTYRVVSVLTVLHQDWLNGKEYKCKVSNKAL |
| | | SQDGALQDTSC | PAPIEKTISKAKGQPREPQVCTLPPSRDELTKNQVSLSCAVKGFYPSDIAVEWESN |
| | | QVHAWPDRRR | GQPENNYKTTPPVLDSDGSFFLVSKLTVDKSRWQQGNVFSCSVMHEALHNHYT |
| | | WNQTCELLPVS | QKSLSLSPGGPPSGSSPMPYDLYHPSGGGAVNGTSQFTCFYNSRANISCVWSQD |
| | | QASWACNLILG | GALQDTSCQVHAWPDRRRWNQTCELLPVSQASWACNLILGAPDSQKLTTVDIV |
| | | APDSQKLTTVDI | TLRVLCREGVRWRVMAIQDFKPFENLRLMAPISLQVVHVETHRCNISWEISQAS |
| | | VTLRVLCREGVR | HYFERHLEFEARTLSPGHTWEEAPLLTLKQKQEWICLETLTPDTQYEFQVRVKPL |
| | | WRVMAIQDFK | QGEFTTWSPWSQPLAFRTKPAALGKD |
| | | PFENLRLMAPIS | |
| | | LQVVHVETHRC | |
| | | NISWEISQASHY | |
| | | FERHLEFEARTL | |
| | | SPGHTWEEAPL | |
| | | LTLKQKQEWICL | |
| | | ETLTPDTQYEFQ | |
| | | VRVKPLQGEFTT | |
| | | WSPWSQPLAFR | |
| | | TKPAALGKD | |
| | [symbol] 511 | | ESKYGPPCPPCPAPEFLGGPSVFLFPPKPKDTLMISRTPEVTCVVVDVSQEDPEVQ |
| | | | FNWYVDGVEVHNAKTKPREEQFNSTYRVVSVLTVLHQDWLNGKEYKCKVSNKG |
| | | | LPSSIEKTISKAKGQPREPQVYTLPPCQEEMTKNQVSLWCLVKGFYPSDIAVEWES |
| | | | NGQPENNYKTTPPVLDSDGSFFLYSRLTVDKSRWQEGNVFSCSVMHEALHNHYT |
| | | | QKSLSLSLGGGSSPPGGGSSGGGSGPAPTSSSTKKTQLQLEHLLLDLQMILNGINN |
| | | | YKNPKLTAMLTAKFAMPKKATELKHLQCLEEALKPLEEVLNLAQSKNFHLRPRDLI |
| | | | SNINVIVLELKGSETTFMCEYADETATIVEFLNRWITFAQSIISTLT |
| | [symbol] 511 | AVNGTSQFTCF | ESKYGPPCPPCPAPEFLGGPSVFLFPPKPKDTLMISRTPEVTCVVVDVSQEDPEVQ |
| | | YNSRANISCVW | FNWYVDGVEVHNAKTKPREEQFNSTYRVVSVLTVLHQDWLNGKEYKCKVSNKG |
| | | SQDGALQDTSC | LPSSIEKTISKAKGQPREPQVCTLPPSQEEMTKNQVSLSCAVKGFYPSDIAVEWES |
| | | QVHAWPDRRR | NGQPENNYKTTPPVLDSDGSFFLYSRLTVDKSRWQEGNVFSCSVMHEALHNHYT |
| | | WNQTCELLPVS | QKSLSLSLGGPPSGSSPGVPLSLYGSGGGAVNGTSQFTCFYNSRANISCVWSQDG |
| | | QASWACNLILG | ALQDTSCQVHAWPDRRRWNQTCELLPVSQASWACNLILGAPDSQKLTTVDIVT |
| | | APDSQKLTTVDI | LRVLCREGVRWRVMAIQDFKPFENLRLMAPISLQVVHVETHRCNISWEISQASH |
| | | VTLRVLCREGVR | YFERHLEFEARTLSPGHTWEEAPLLTLKQKQEWICLETLTPDTQYEFQVRVKPLQ |
| | | WRVMAIQDFK | GEFTTWSPWSQPLAFRTKPAALGKD |
| | | PFENLRLMAPIS | |
| | | LQVVHVETHRC | |
| | | NISWEISQASHY | |
| | | FERHLEFEARTL | |
| | | SPGHTWEEAPL | |
| | | LTLKQKQEWICL | |
| | | ETLTPDTQYEFQ | |
| | | VRVKPLQGEFTT | |
| | | WSPWSQPLAFR | |
| | | TKPAALGKD | |
| | [symbol] 512 | | DKTHTCPPCPAPELLGGPSVFLFPPKPKDTLMASRTPEVTCVVVDVSHEDPEVKF |
| | | | NWYVDGVEVHNAKTKPREEQYASTYRVVSVLTVLHQDWLNGKEYKCKVSNKAL |
| | | | PAPIEKTISKAKGQPREPQVYTLPPCRDELTKNQVSLWCLVKGFYPSDIAVEWESN |
| | | | GQPENNYKTTPPVLDSDGSFFLYSKLTVDKSRWQQGNVFSCSVMHEALHNHYT |
| | | | QKSLSLSPGGGSSPPGGGSSGGGSGPAPTSSSTKKTQLQLEHLLLDLQMILNGINN |
| | | | YKNPKLTAMLTAKFAMPKKATELKHLQCLEEALKPLEEVLNLAQSKNFHLRPRDLI |
| | | | SNINVIVLELKGSETTFMCEYADETATIVEFLNRWITFAQSIISTLT |
| | [symbol] 512 | | DKTHTCPPCPAPELLGGPSVFLFPPKPKDTLMASRTPEVTCVVVDVSHEDPEVKF |
| | | | NWYVDGVEVHNAKTKPREEQYASTYRVVSVLTVLHQDWLNGKEYKCKVSNKAL |
| | | | PAPIEKTISKAKGQPREPQVCTLPPSRDELTKNQVSLSCAVKGFYPSDIAVEWESN |
| | | | GQPENNYKTTPPVLDSDGSFFLVSKLTVDKSRWQQGNVFSCSVMHEALHNHYT |
| | | | QKSLSLSPG |
| | [symbol] 513 | | ESKYGPPCPPCPAPEFLGGPSVFLFPPKPKDTLMISRTPEVTCVVVDVSQEDPEVQ |
| | | | FNWYVDGVEVHNAKTKPREEQFNSTYRVVSVLTVLHQDWLNGKEYKCKVSNKG |
| | | | LPSSIEKTISKAKGQPREPQVYTLPPCQEEMTKNQVSLWCLVKGFYPSDIAVEWES |
| | | | NGQPENNYKTTPPVLDSDGSFFLYSRLTVDKSRWQEGNVFSCSVMHEALHNHYT |
| | | | QKSLSLSLGGGSSPPGGGSSGGGSGPAPTSSSTKKTQLQLEHLLLDLQMILNGINN |
| | | | YKNPKLTAMLTAKFAMPKKATELKHLQCLEEALKPLEEVLNLAQSKNFHLRPRDLI |
| | | | SNINVIVLELKGSETTFMCEYADETATIVEFLNRWITFAQSIISTLT |
| | [symbol] 513 | | ESKYGPPCPPCPAPEFLGGPSVFLFPPKPKDTLMISRTPEVTCVVVDVSQEDPEVQ |
| | | | FNWYVDGVEVHNAKTKPREEQFNSTYRVVSVLTVLHQDWLNGKEYKCKVSNKG |
| | | | LPSSIEKTISKAKGQPREPQVCTLPPSQEEMTKNQVSLSCAVKGFYPSDIAVEWES |
| | | | NGQPENNYKTTPPVLDSDGSFFLYSRLTVDKSRWQEGNVFSCSVMHEALHNHYT |
| | | | QKSLSLSLGPG |
| | [symbol] 526 | | DKTHTCPPCPAPELLGGPSVFLFPPKPKDTLMISRTPEVTCVVVDVSHEDPEVKFN |
| | | | WYVDGVEVHNAKTKPREEQYNSTYRVVSVLTVLHQDWLNGKEYKCKVSNKALP |
| | | | APIEKTISKAKGQPREPQVYTLPPCRDELTKNQVSLWCLVKGFYPSDIAVEWESN |
| | | | GQPENNYKTTPPVLDSDGSFFLYSKLTVDKSRWQQGNVFSCSVMHEALHNHYT |
| | | | QKSLSLSPGGGSSPPGGGSSGGGSGPAPTSSSTKKTQLQLEHLLLDLQMILNGINN |
| | | | YKNPKLTAMLTAKFAMPKKATELKHLQCLEEALKPLEEVLNLAQSKNFHLRPRDLI |
| | | | SNINVIVLELKGSETTFMCEYADETATIVEFLNRWITFAQSIISTLT |
| | [symbol] 526 | AVNGTSQFTCF | DKTHTCPPCPAPELLGGPSVFLFPPKPKDTLMISRTPEVTCVVVDVSHEDPEVKFN |
| | | YNSRANISCVW | WYVDGVEVHNAKTKPREEQYNSTYRVVSVLTVLHQDWLNGKEYKCKVSNKALP |
| | | SQDGALQDTSC | APIEKTISKAKGQPREPQVCTLPPSRDELTKNQVSLSCAVKGFYPSDIAVEWESNG |
| | | QVHAWPDRRR | QPENNYKTTPPVLDSDGSFFLVSKLTVDKSRWQQGNVFSCSVMHEALHNHYTQ |
| | | WNQTCELLPVS | KSLSLSPGGPPSGSSPGVPLSLYGSGGGAVNGTSQFTCFYNSRANISCVWSQDGA |
| | | QASWACNLILG | LQDTSCQVHAWPDRRRWNQTCELLPVSQASWACNLILGAPDSQKLTTVDIVTL |
| | | APDSQKLTTVDI | RVLCREGVRWRVMAIQDFKPFENLRLMAPISLQVVHVETHRCNISWEISQASHY |
| | | VTLRVLCREGVR | FERHLEFEARTLSPGHTWEEAPLLTLKQKQEWICLETLTPDTQYEFQVRVKPLQG |
| | | WRVMAIQDFK | EFTTWSPWSQPLAFRTKPAALGKD |
| | | PFENLRLMAPIS | |
| | | LQVVHVETHRC | |
| | | NISWEISQASHY | |
| | | FERHLEFEARTL | |
| | | SPGHTWEEAPL | |
| | | LTLKQKQEWICL | |
| | | ETLTPDTQYEFQ | |
| | | VRVKPLQGEFTT | |
| | | WSPWSQPLAFR | |
| | | TKPAALGKD | |
| | [symbol] 530 | | DKTHTCPPCPAPELLGGPSVFLFPPKPKDTLMISRTPEVTCVVVDVSHEDPEVKFN |
| | | | WYVDGVEVHNAKTKPREEQYASTYRVVSVLTVLHQDWLNGKEYKCKVSNKALP |
| | | | APIEKTISKAKGQPREPQVYTLPPCRDELTKNQVSLWCLVKGFYPSDIAVEWESN |
| | | | GQPENNYKTTPPVLDSDGSFFLYSKLTVDKSRWQQGNVFSCSVMHEALHNHYT |
| | | | QKSLSLSPGGGSSPPGGGSSGGGSGPAPTSSSTKKTQLQLEHLLLDLQMILNGINN |
| | | | YKNPKLTAMLTAKFAMPKKATELKHLQCLEEALKPLEEVLNLAQSKNFHLRPRDLI |
| | | | SNINVIVLELKGSETTFMCEYADETATIVEFLNRWITFAQSIISTLT |
| | [symbol] 530 | AVNGTSQFTCF | DKTHTCPPCPAPELLGGPSVFLFPPKPKDTLMISRTPEVTCVVVDVSHEDPEVKFN |
| | | YNSRANISCVW | WYVDGVEVHNAKTKPREEQYASTYRVVSVLTVLHQDWLNGKEYKCKVSNKALP |
| | | SQDGALQDTSC | APIEKTISKAKGQPREPQVCTLPPSRDELTKNQVSLSCAVKGFYPSDIAVEWESNG |
| | | QVHAWPDRRR | QPENNYKTTPPVLDSDGSFFLVSKLTVDKSRWQQGNVFSCSVMHEALHNHYTQ |
| | | WNQTCELLPVS | KSLSLSPGGPPSGSSPMPYDLYHPSGGGAVNGTSQFTCFYNSRANISCVWSQDG |
| | | QASWACNLILG | ALQDTSCQVHAWPDRRRWNQTCELLPVSQASWACNLILGAPDSQKLTTVDIVT |
| | | APDSQKLTTVDI | LRVLCREGVRWRVMAIQDFKPFENLRLMAPISLQVVHVETHRSNISWEISQASHY |
| | | VTLRVLCREGVR | FERHLEFEARTLSPGHTWEEAPLLTLKQKQEWISLETLTPDTQYEFQVRVKPLQGE |
| | | WRVMAIQDFK | FTTWSPWSQPLAFRTKPAALGKD |
| | | PFENLRLMAPIS | |
| | | LQVVHVETHRS | |
| | | NISWEISQASHY | |
| | | FERHLEFEARTL | |
| | | SPGHTWEEAPL | |
| | | LTLKQKQEWISL | |
| | | ETLTPDTQYEFQ | |
| | | VRVKPLQGEFTT | |
| | | WSPWSQPLAFR | |
| | | TKPAALGKD | |
| | [symbol] 531 | | DKTHTCPPCPAPELLGGPSVFLFPPKPKDTLMISRTPEVTCVVVDVSHEDPEVKFN |
| | | | WYVDGVEVHNAKTKPREEQYASTYRVVSVLTVLHQDWLNGKEYKCKVSNKALP |
| | | | APIEKTISKAKGQPREPQVYTLPPCRDELTKNQVSLWCLVKGFYPSDIAVEWESN |
| | | | GQPENNYKTTPPVLDSDGSFFLYSKLTVDKSRWQQGNVFSCSVMHEALHNHYT |
| | | | QKSLSLSPGGGSSPPGGGSSGGGSGPAPTSSSTKKTQLQLEHLLLDLQMILNGINN |
| | | | YKNPKLTAMLTAKFAMPKKATELKHLQCLEEALKPLEEVLNLAQSKNFHLRPRDLI |
| | | | SNINVIVLELKGSETTFMCEYADETATIVEFLNRWITFAQSIISTLT |
| | [symbol] 531 | AVNGTSQFTCF | DKTHTCPPCPAPELLGGPSVFLFPPKPKDTLMISRTPEVTCVVVDVSHEDPEVKFN |
| | | YNSRANISCVW | WYVDGVEVHNAKTKPREEQYASTYRVVSVLTVLHQDWLNGKEYKCKVSNKALP |
| | | SQDGALQDTSC | APIEKTISKAKGQPREPQVCTLPPSRDELTKNQVSLSCAVKGFYPSDIAVEWESNG |
| | | QVHAWPDRRR | QPENNYKTTPPVLDSDGSFFLVSKLTVDKSRWQQGNVFSCSVMHEALHNHYTQ |
| | | WNQTCELLPVS | KSLSLSPGGPPSGSSPGDSGGFMLTSGGGAVNGTSQFTCFYNSRANISCVWSQD |
| | | QASWACNLILG | GALQDTSCQVHAWPDRRRWNQTCELLPVSQASWACNLILGAPDSQKLTTVDIV |
| | | APDSQKLTTVDI | TLRVLCREGVRWRVMAIQDFKPFENLRLMAPISLQVVHVETHRSNISWEISQASH |
| | | VTLRVLCREGVR | YFERHLEFEARTLSPGHTWEEAPLLTLKQKQEWISLETLTPDTQYEFQVRVKPLQG |
| | | WRVMAIQDFK | EFTTWSPWSQPLAFRTKPAALGKD |
| | | PFENLRLMAPIS | |
| | | LQVVHVETHRS | |
| | | NISWEISQASHY | |
| | | FERHLEFEARTL | |
| | | SPGHTWEEAPL | |
| | | LTLKQKQEWISL | |
| | | ETLTPDTQYEFQ | |
| | | VRVKPLQGEFTT | |
| | | WSPWSQPLAFR | |
| | | TKPAALGKD | |
| | [symbol] 532 | | DKTHTCPPCPAPELLGGPSVFLFPPKPKDTLMISRTPEVTCVVVDVSHEDPEVKFN |
| | | | WYVDGVEVHNAKTKPREEQYNSTYRVVSVLTVLHQDWLNGKEYKCKVSNKALP |
| | | | APIEKTISKAKGQPREPQVCTLPPSRDELTKNQVSLSCAVKGFYPSDIAVEWESNG |
| | | | QPENNYKTTPPVLDSDGSFFLVSKLTVDKSRWQQGNVFSCSVMHEALHNHYTQ |
| | | | KSLSLSPGPGSGSAVNGTSQFTCFYNSRANISCVWSQDGALQDTSCQVHAWPDR |
| | | | RRWNQTCELLPVSQASWACNLILGAPDSQKLTTVDIVTLRVLCREGVRWRVMAI |
| | | | QDFKPFENLRLMAPISLQVVHVETHRCNISWEISQASHYFERHLEFEARTLSPGHT |
| | | | WEEAPLLTLKQKQEWICLETLTPDTQYEFQVRVKPLQGEFTTWSPWSQPLAFRT |
| | | | KPAALGKD |
| | [symbol] 532 | APTSSSTKKTQL | DKTHTCPPCPAPELLGGPSVFLFPPKPKDTLMISRTPEVTCVVVDVSHEDPEVKFN |
| | | QLEHLLLDLQMI | WYVDGVEVHNAKTKPREEQYNSTYRVVSVLTVLHQDWLNGKEYKCKVSNKALP |
| | | LNGINNYKNPKL | APIEKTISKAKGQPREPQVYTLPPCRDELTKNQVSLWCLVKGFYPSDIAVEWESN |
| | | TAMLTAKFAMP | GQPENNYKTTPPVLDSDGSFFLYSKLTVDKSRWQQGNVFSCSVMHEALHNHYT |
| | | KKATELKHLQCL | QKSLSLSPGGSPGVPLSLYSGPAPTSSSTKKTQLQLEHLLLDLQMILNGINNYKNPK |
| | | EEALKPLEEVLN | LTAMLTAKFAMPKKATELKHLQCLEEALKPLEEVLNLAQSKNFHLRPRDLISNINVI |
| | | LAQSKNFHLRPR | VLELKGSETTFMCEYADETATIVEFLNRWITFAQSIISTLT |
| | | DLISNINVIVLEL | |
| | | KGSETTFMCEY | |
| | | ADETATIVEFLN | |
| | | RWITFAQSIISTL | |
| | | T | |
| | | | Component2 |
| [symbol] me | newnames | Component1Sequence | Sequence |
| [symbol] A158 | Hole: | DKTHTCPPCPAPELLGGPSVFLFPPKPKDTLMISRTPEVTCVVVDVSHED | |
| | hFc(N297A) | PEVKFNWYVDGVEVHNAKTKPREEQYASTYRVVSVLTVLHQDWLNGK | |
| | | EYKCKVSNKALPAPIEKTISKAKGQPREPQVCTLPPSRDELTKNQVSLSCA | |
| | | VKGFYPSDIAVEWESNGQPENNYKTTPPVLDSDGSFFLVSKLTVDKSRW | |
| | | QQGNVFSCSVMHEALHNHYTQKSLSLSPG | |
| [symbol] A187 | Hole: | DKTHTCPPCPAPELLGGPSVFLFPPKPKDTLMISRTPEVTCVVVDVSHED | PGSGS |
| | hFc(N297A)- | PEVKFNWYVDGVEVHNAKTKPREEQYASTYRVVSVLTVLHQDWLNGK | |
| | hCD122 | EYKCKVSNKALPAPIEKTISKAKGQPREPQVCTLPPSRDELTKNQVSLSCA | |
| | | VKGFYPSDIAVEWESNGQPENNYKTTPPVLDSDGSFFLVSKLTVDKSRW | |
| | | QQGNVFSCSVMHEALHNHYTQKSLSLSPG | |
| [symbol] A255 | Knob: | DKTHTCPPCPAPELLGGPSVFLFPPKPKDTLMISRTPEVTCVVVDVSHED | GGSSPPGGGSSG |
| | hFc(N297A)- | PEVKFNWYVDGVEVHNAKTKPREEQYASTYRVVSVLTVLHQDWLNGK | GGSGP |
| | hIL2(R38A, F42A, | EYKCKVSNKALPAPIEKTISKAKGQPREPQVYTLPPCRDELTKNQVSLWC | |
| | Y45A, E62A, | LVKGFYPSDIAVEWESNGQPENNYKTTPPVLDSDGSFFLYSKLTVDKSR | |
| | C125A) | WQQGNVFSCSVMHEALHNHYTQKSLSLSPG | |
| [symbol] A263 | Knob: | DKTHTCPPCPAPELLGGPSVFLFPPKPKDTLMISRTPEVTCVVVDVSHED | GSPG |
| | hFc(N297A)- | PEVKFNWYVDGVEVHNAKTKPREEQYASTYRVVSVLTVLHQDWLNGK | |
| | [VPLSLY]- | EYKCKVSNKALPAPIEKTISKAKGQPREPQVYTLPPCRDELTKNQVSLWC | |
| | hIL2(R38A, F42A, | LVKGFYPSDIAVEWESNGQPENNYKTTPPVLDSDGSFFLYSKLTVDKSR | |
| | Y45A, E62A, | WQQGNVFSCSVMHEALHNHYTQKSLSLSPG | |
| | C125A) | | |
| [symbol] A278 | Knob: | DKTHTCPPCPAPELLGGPSVFLFPPKPKDTLMISRTPEVTCVVVDVSHED | GSGP |
| | hFc(N297A)- | PEVKFNWYVDGVEVHNAKTKPREEQYASTYRVVSVLTVLHQDWLNGK | |
| | [DSGGFMLT]- | EYKCKVSNKALPAPIEKTISKAKGQPREPQVYTLPPCRDELTKNQVSLWC | |
| | hIL2(C125A) | LVKGFYPSDIAVEWESNGQPENNYKTTPPVLDSDGSFFLYSKLTVDKSR | |
| | | WQQGNVFSCSVMHEALHNHYTQKSLSLSPG | |
| [symbol] A281 | Knob: | DKTHTCPPCPAPELLGGPSVFLFPPKPKDTLMISRTPEVTCVVVDVSHED | GSGP |
| | hFc(N297A)- | PEVKFNWYVDGVEVHNAKTKPREEQYASTYRVVSVLTVLHQDWLNGK | |
| | [DSGGFMLT]- | EYKCKVSNKALPAPIEKTISKAKGQPREPQVYTLPPCRDELTKNQVSLWC | |
| | hIL2(R38A, F42A, | LVKGFYPSDIAVEWESNGQPENNYKTTPPVLDSDGSFFLYSKLTVDKSR | |
| | Y45A, E62A, | WQQGNVFSCSVMHEALHNHYTQKSLSLSPG | |
| | C125A) | | |
| [symbol] A440 | Hole: | DKTHTCPPCPAPELLGGPSVFLFPPKPKDTLMISRTPEVTCVVVDVSHED | PGSGS |
| | hFc(N297A)- | PEVKFNWYVDGVEVHNAKTKPREEQYASTYRVVSVLTVLHQDWLNGK | |
| | hCD122(C122S, | EYKCKVSNKALPAPIEKTISKAKGQPREPQVCTLPPSRDELTKNQVSLSCA | |
| | C168S) | VKGFYPSDIAVEWESNGQPENNYKTTPPVLDSDGSFFLVSKLTVDKSRW | |
| | | QQGNVFSCSVMHEALHNHYTQKSLSLSPG | |
| [symbol] A476 | Knob: | DKTHTCPPCPAPELLGGPSVFLFPPKPKDTLMISRTPEVTCVVVDVSHED | G |
| | hFc(N297A)- | PEVKFNWYVDGVEVHNAKTKPREEQYASTYRVVSVLTVLHQDWLNGK | |
| | [NPMGSDPVNFK | EYKCKVSNKALPAPIEKTISKAKGQPREPQVYTLPPCRDELTKNQVSLWC | |
| | LLRVVNG]- | LVKGFYPSDIAVEWESNGQPENNYKTTPPVLDSDGSFFLYSKLTVDKSR | |
| | hIL2(F42S, E62S, | WQQGNVFSCSVMHEALHNHYTQKSLSLSPG | |
| | C125A) | | |
| [symbol] A477 | Knob: | TIKPCPPCKCPAPNAAGGPSVFIFPPKIKDVLMISLSPIVTCVVVDVSEDDP | GGSSPPGGGSSG |
| | mFcIgG2a(LALAPG)- | DVQISWFVNNVEVHTAQTQTHREDYNSTLRVVSALPIQHQDWMSGKE | GGSGP |
| | hIL2(R38A, | FKCKVNNKDLGAPIERTISKPKGSVRAPQVYVLPPCEEEMTKKQVTLWC | |
| | F42A, Y45A, | MVTDFMPEDIYVEWTNNGKTELNYKNTEPVLDSDGSYFMYSKLRVEKK | |
| | E62A, C125A) | NWVERNSYSCSVVHEGLHNHHTTKSFSRTPG | |
| [symbol] A478 | Knob: | TIKPCPPCKCPAPNAAGGPSVFIFPPKIKDVLMISLSPIVTCVVVDVSEDDP | GSPG |
| | mFcIgG2a(LALAPG)- | DVQISWFVNNVEVHTAQTQTHREDYNSTLRVVSALPIQHQDWMSGKE | |
| | [VPLSLY]- | FKCKVNNKDLGAPIERTISKPKGSVRAPQVYVLPPCEEEMTKKQVTLWC | |
| | hIL2(R38A, F42A, | MVTDFMPEDIYVEWTNNGKTELNYKNTEPVLDSDGSYFMYSKLRVEKK | |
| | Y45A, E62A, | NWVERNSYSCSVVHEGLHNHHTTKSFSRTPG | |
| | C125A) | | |
| [symbol] A479 | Hole: | TIKPCPPCKCPAPNAAGGPSVFIFPPKIKDVLMISLSPIVTCVVVDVSEDDP | |
| | mFcIgG2a(LALAPG) | DVQISWFVNNVEVHTAQTQTHREDYNSTLRVVSALPIQHQDWMSGKE | |
| | | FKCKVNNKDLGAPIERTISKPKGSVRAPQVCVLPPPEEEMTKKQVTLSCA | |
| | | VTDFMPEDIYVEWTNNGKTELNYKNTEPVLDSDGSYFMVSKLRVEKKN | |
| | | WVERNSYSCSVVHEGLHNHHTTKSFSRTPG | |
| [symbol] A480 | Hole: | TIKPCPPCKCPAPNAAGGPSVFIFPPKIKDVLMISLSPIVTCVVVDVSEDDP | PGSGS |
| | mFcIgG2a(LALAPG)- | DVQISWFVNNVEVHTAQTQTHREDYNSTLRVVSALPIQHQDWMSGKE | |
| | hCD122 | FKCKVNNKDLGAPIERTISKPKGSVRAPQVCVLPPPEEEMTKKQVTLSCA | |
| | | VTDFMPEDIYVEWTNNGKTELNYKNTEPVLDSDGSYFMVSKLRVEKKN | |
| | | WVERNSYSCSVVHEGLHNHHTTKSFSRTPG | |
| [symbol] A516 | F8ScFvVersion1- | EVQLLESGGGLVQPGGSLRLSCAASGFTFSLFTMSVVVRQAPGKGLEVV | GGS |
| | Hole: | VSAISGSGGSTYYADSVKGRFTISRDNSKNTLYLQMNSLRAEDTAVYYCA | |
| | hFc(N297A)- | KSTHLYLFDYWGQGTLVTVSSGGGGSGGGGSGGGGSEIVLTQSPGTLSL | |
| | hCD122 | SPGERATLSCRASQSVSMPFLAWYQQKPGQAPRLLIYGASSRATGIPDR | |
| | | FSGSGSGTDFTLTISRLEPEDFAVYYCQQMRGRPPTFGQGTKVEIK | |
| [symbol] A520 | Hole: | TIKPCPPCKCPAPNAAGGPSVFIFPPKIKDVLMISLSPIVTCVVVDVSEDDP | HHHHHHHH |
| | mFcIgG2a(LALAPG)- | DVQISWFVNNVEVHTAQTQTHREDYNSTLRVVSALPIQHQDWMSGKE | |
| | NoAnnotationFound | FKCKVNNKDLGAPIERTISKPKGSVRAPQVCVLPPPEEEMTKKQVTLSCA | |
| | | VTDFMPEDIYVEWTNNGKTELNYKNTEPVLDSDGSYFMVSKLRVEKKN | |
| | | WVERNSYSCSVVHEGLHNHHTTKSFSRTPG | |
| [symbol] A521 | Hole: | TIKPCPPCKCPAPNAAGGPSVFIFPPKIKDVLMISLSPIVTCVVVDVSEDDP | PGSGS |
| | mFcIgG2a(LALAPG)- | DVQISWFVNNVEVHTAQTQTHREDYNSTLRVVSALPIQHQDWMSGKE | |
| | hCD122- | FKCKVNNKDLGAPIERTISKPKGSVRAPQVCVLPPPEEEMTKKQVTLSCA | |
| | NoAnnotationFound | VTDFMPEDIYVEWTNNGKTELNYKNTEPVLDSDGSYFMVSKLRVEKKN | |
| | | WVERNSYSCSVVHEGLHNHHTTKSFSRTPG | |
| [symbol] A522 | Hole: | TIKPCPPCKCPAPNAAGGPSVFIFPPKIKDVLMISLSPIVTCVVVDVSEDDP | PGSGS |
| | mFcIgG2a(LALAPG)- | DVQISWFVNNVEVHTAQTQTHREDYNSTLRVVSALPIQHQDWMSGKE | |
| | mCD122- | FKCKVNNKDLGAPIERTISKPKGSVRAPQVCVLPPPEEEMTKKQVTLSCA | |
| | NoAnnotationFound | VTDFMPEDIYVEWTNNGKTELNYKNTEPVLDSDGSYFMVSKLRVEKKN | |
| | | WVERNSYSCSVVHEGLHNHHTTKSFSRTPG | |
| [symbol] A528 | Hole: | DKTHTCPPCPAPELLGGPSVFLFPPKPKDTLMISRTPEVTCVVVDVSHED | PGSGS |
| | hFc(N297A)- | PEVKFNWYVDGVEVHNAKTKPREEQYASTYRVVSVLTVLHQDWLNGK | |
| | hCD122(C168S) | EYKCKVSNKALPAPIEKTISKAKGQPREPQVCTLPPSRDELTKNQVSLSCA | |
| | | VKGFYPSDIAVEWESNGQPENNYKTTPPVLDSDGSFFLVSKLTVDKSRW | |
| | | QQGNVFSCSVMHEALHNHYTQKSLSLSPG | |
| [symbol] A530 | Knob: | VRSGCKPCICTVPEVSSVFIFPPKPKDVLTITLTPKVTCVVVAISKDDPEVQ | GGSSPPGGGSSG |
| | mFcIgG1(DAPG)- | FSWFVDDVEVHTAQTQPREEQFNSTFRSVSELPIMHQDWLNGKEFKCR | GGSGP |
| | hIL2(R38A, F42A, | VNSAAFGAPIEKTISKTKGRPKAPQVYTIPPPKEQMAKDKVSLTCMITDF | |
| | Y45A, E62A, | FPEDITVEWQWNGQPAENYDNTQPIMDTDGSYFVYSDLNVQKSNWE | |
| | C125A) | AGNTFTCSVLHEGLHNHHTEKSLSHSPG | |
| [symbol] A531 | Knob: | VRSGCKPCICTVPEVSSVFIFPPKPKDVLTITLTPKVTCVVVAISKDDPEVQ | GSPG |
| | mFcIgG1(DAPG)- | FSWFVDDVEVHTAQTQPREEQFNSTFRSVSELPIMHQDWLNGKEFKCR | |
| | [VPLSLY]- | VNSAAFGAPIEKTISKTKGRPKAPQVYTIPPPKEQMAKDKVSLTCMITDF | |
| | hIL2(R38A, F42A, | FPEDITVEWQWNGQPAENYDNTQPIMDTDGSYFVYSDLNVQKSNWE | |
| | Y45A, E62A, | AGNTFTCSVLHEGLHNHHTEKSLSHSPG | |
| | C125A) | | |
| [symbol] A532 | Hole: | VRSGCKPCICTVPEVSSVFIFPPKPKDVLTITLTPKVTCVVVAISKDDPEVQ | |
| | mFcIgG1(DAPG) | FSWFVDDVEVHTAQTQPREEQFNSTFRSVSELPIMHQDWLNGKEFKCR | |
| | | VNSAAFGAPIEKTISKTKGRPKAPQVYTIPPPKKQMAKDKVSLTCMITDF | |
| | | FPEDITVEWQWNGQPAENYKNTQPIMKTDGSYFVYSKLNVQKSNWEA | |
| | | GNTFTCSVLHEGLHNHHTEKSLSHSPG | |
| [symbol] A533 | Hole: | VRSGCKPCICTVPEVSSVFIFPPKPKDVLTITLTPKVTCVVVAISKDDPEVQ | PGSGS |
| | mFcIgG1(DAPG)- | FSWFVDDVEVHTAQTQPREEQFNSTFRSVSELPIMHQDWLNGKEFKCR | |
| | hCD122 | VNSAAFGAPIEKTISKTKGRPKAPQVYTIPPPKKQMAKDKVSLTCMITDF | |
| | | FPEDITVEWQWNGQPAENYKNTQPIMKTDGSYFVYSKLNVQKSNWEA | |
| | | GNTFTCSVLHEGLHNHHTEKSLSHSPG | |
| [symbol] A534 | Hole: | VRSGCKPCICTVPEVSSVFIFPPKPKDVLTITLTPKVTCVVVAISKDDPEVQ | PGSGS |
| | mFcIgG1(DAPG)- | FSWFVDDVEVHTAQTQPREEQFNSTFRSVSELPIMHQDWLNGKEFKCR | |
| | mCD122 | VNSAAFGAPIEKTISKTKGRPKAPQVYTIPPPKKQMAKDKVSLTCMITDF | |
| | | FPEDITVEWQWNGQPAENYKNTQPIMKTDGSYFVYSKLNVQKSNWEA | |
| | | GNTFTCSVLHEGLHNHHTEKSLSHSPG | |
| [symbol] A542 | Knob: | DKTHTCPPCPAPELLGGPSVFLFPPKPKDTLMISRTPEVTCVVVDVSHED | GISSGLLSGRSDQP |
| | hFc(N297A)- | PEVKFNWYVDGVEVHNAKTKPREEQYASTYRVVSVLTVLHQDWLNGK | SGP |
| | hIL2(R38A, F42A, | EYKCKVSNKALPAPIEKTISKAKGQPREPQVYTLPPCRDELTKNQVSLWC | |
| | Y45A, E62A, | LVKGFYPSDIAVEWESNGQPENNYKTTPPVLDSDGSFFLYSKLTVDKSR | |
| | C125A) | WQQGNVFSCSVMHEALHNHYTQKSLSLSPG | |
| [symbol] A543 | Hole: | DKTHTCPPCPAPELLGGPSVFLFPPKPKDTLMISRTPEVTCVVVDVSHED | GPPSGSSP |
| | hFc(N297A)- | PEVKFNWYVDGVEVHNAKTKPREEQYASTYRVVSVLTVLHQDWLNGK | |
| | [VPLSLY]-hCD122 | EYKCKVSNKALPAPIEKTISKAKGQPREPQVCTLPPSRDELTKNQVSLSCA | |
| | | VKGFYPSDIAVEWESNGQPENNYKTTPPVLDSDGSFFLVSKLTVDKSRW | |
| | | QQGNVFSCSVMHEALHNHYQKSLSLSPG | |
| [symbol] A544 | Knob: | DKTHTCPPCPAPELLGGPSVFLFPPKPKDTLMISRTPEVTCVVVDVSHED | GSPG |
| | hFc(N297A)- | PEVKFNWYVDGVEVHNAKTKPREEQYASTYRVVSVLTVLHQDWLNGK | |
| | [VPLSLY]- | EYKCKVSNKALPAPIEKTISKAKGQPREPQVYTLPPCRDELTKNQVSLWC | |
| | hIL2(R38A, F42A, | LVKGFYPSDIAVEWESNGQPENNYKTTPPVLDSDGSFFLYSKLTVDKSR | |
| | Y45A, E62A, | WQQGNVFSCSVMHEALHNHYTQKSLSLSPG | |
| | L80F, R81D, | | |
| | L85V, I86V, I92F, | | |
| | C125A) | | |
| [symbol] A545 | Knob: | DKTHTCPPCPAPELLGGPSVFLFPPKPKDTLMISRTPEVTCVVVDVSHED | GISSGLLSGRSSGP |
| | hFc(N297A)- | PEVKFNWYVDGVEVHNAKTKPREEQYASTYRVVSVLTVLHQDWLNGK | |
| | hIL2(R38A, F42A, | EYKCKVSNKALPAPIEKTISKAKGQPREPQVYTLPPCRDELTKNQVSLWC | |
| | Y45A, E62A, | LVKGFYPSDIAVEWESNGQPENNYKTTPPVLDSDGSFFLYSKLTVDKSR | |
| | C125A) | WQQGNVFSCSVMHEALHNHYTQKSLSLSPG | |
| [symbol] A546 | Knob: | DKTHTCPPCPAPELLGGPSVFLFPPKPKDTLMISRTPEVTCVVVDVSHED | GGSSPPGGGSSG |
| | hFc(N297A)- | PEVKFNWYVDGVEVHNAKTKPREEQYASTYRVVSVLTVLHQDWLNGK | GGSGP |
| | hIL2(R38A, F42A, | EYKCKVSNKALPAPIEKTISKAKGQPREPQVYTLPPCRDELTKNQVSLWC | |
| | Y45A, E62A, | LVKGFYPSDIAVEWESNGQPENNYKTTPPVLDSDGSFFLYSKLTVDKSR | |
| | L80F, R81D, | WQQGNVFSCSVMHEALHNHYTQKSLSLSPG | |
| | L85V, I86V, 192F, | | |
| | C125A) | | |
| [symbol] A547 | Hole: | EPKSSDKTHTCPPCPAPELLGGPSVFLFPPKPKDTLMISRTPEVTCVVVDV | DKTHTCPPCPAPE |
| | hFcIgG1(N297A + | SHEDPEVKFNWYVDGVEVHNAKTKPREEQYASTYRVVSVLTVLHQDWL | LLGGPSVFLFPPKP |
| | EPKSS)-Hole: | NGKEYKCKVSNKALPAPIEKTISKAKGQPREPQVCTLPPSRDELTKNQVSL | KDTLMISRTPEVT |
| | hFc(N297A)- | SCAVKGFYPSDIAVEWESNGQPENNYKTTPPVLDSDGSFFLVSKLTVDKS | CVVVDVSHEDPEV |
| | hCD122 | RWQQGNVFSCSVMHEALHNHYTQKSLSLSPGSNKALPAPIEKTIS | KFNWYVDGVEVH |
| | | | NAKTKPREEQYAS |
| | | | TYRVVSVLTVLHQ |
| | | | DWLNGKEYKCKV |
| | | | SNKALPAPIEKTIS |
| | | | KAKGQPREPQVC |
| | | | TLPPSRDELTKNQ |
| | | | VSLSCAVKGFYPS |
| | | | [symbol] |
| | | | [symbol] |
| | | | LLGGPSVFLFPPKP |
| | | | KDTLMISRTPEVT |
| | | | CVVVDVSHEDPEV |
| [symbol] A548 | Hole: | AKTDKTHTCPPCPAPELLGGPSVFLFPPKPKDTLMISRTPEVTCVVVDVS | KFNWYVDGVEVH |
| | hFcIgG1(N297A + | HEDPEVKFNWYVDGVEVHNAKTKPREEQYASTYRVVSVLTVLHQDWL | NAKTKPREEQYAS |
| | AKT)-Hole: | NGKEYKCKVSNKALPAPIEKTISKAKGQPREPQVCTLPPSRDELTKNQVSL | TYRVVSVLTVLHQ |
| | hFc(N297A)- | SCAVKGFYPSDIAVEWESNGQPENNYKTTPPVLDSDGSFFLVSKLTVDKS | DWLNGKEYKCKV |
| | hCD122 | RWQQGNVFSCSVMHEALHNHYTQKSLSLSPGSNKALPAPIEKTIS | SNKALPAPIEKTIS |
| | | | KAKGQPREPQVC |
| | | | TLPPSRDELTKNQ |
| | | | VSLSCAVKGFYPS |
| | | | [symbol] |
| | | | [symbol] |
| | | | CPAPELLGGPSVFL |
| | | | FPPKPKDTLMISRT |
| [symbol] A549 | Hole: | AKTEPKSSDKTHTCPPCPAPELLGGPSVFLFPPKPKDTLMISRTPEVTCVV | PEVTCVVVDVSHE |
| | hFcIgG1(N2971 + | VDVSHEDPEVKFNWYVDGVEVHNAKTKPREEQYASTYRVVSVLTVLHQ | DPEVKFNWYVDG |
| | AKTEPKSS)- | DWLNGKEYKCKVSNKALPAPIEKTISKAKGQPREPQVCTLPPSRDELTKN | VEVHNAKTKPREE |
| | Hole: | QVSLSCAVKGFYPSDIAVEWESNGQPENNYKTTPPVLDSDGSFFLVSKLT | QYASTYRVVSVLT |
| | hFcIgG1(N297A + | VDKSRWQQGNVFSCSVMHEALHNHYTQKSLSLSPG | VLHQDWLNGKEY |
| | EPKSS)-Hole: | | KCKVSNKALPAPIE |
| | hFc(N297A)- | | KTISKAKGQPREP |
| | hCD122 | | QVCTLPPSRDELT |
| | | | KNQVSLSCAVKGF |
| | | | [symbol] |
| [symbol] A550 | Knob: | EPKSSDKTHTCPPCPAPELLGGPSVFLFPPKPKDTLMISRTPEVTCVVVDV | GSPG |
| | hFcIgG1(N297A + | SHEDPEVKFNWYVDGVEVHNAKTKPREEQYASTYRVVSVLTVLHQDWL | |
| | EPKSS)- | NGKEYKCKVSNKALPAPIEKTISKAKGQPREPQVYTLPPCRDELTKNQVSL | |
| | [VPLSLY]- | WCLVKGFYPSDIAVEWESNGQPENNYKTTPPVLDSDGSFFLYSKLTVDK | |
| | hIL2(R38A, F42A, | SRWQQGNVFSCSVMHEALHNHYTQKSLSLSPG | |
| | Y45A, E62A, | | |
| | C125A) | | |
| [symbol] A551 | Knob: | AKTDKTHTCPPCPAPELLGGPSVFLFPPKPKDTLMISRTPEVTCVVVDVS | GSPG |
| | hFcIgG1(N297A + | hFdHEDPEVKFNWYVDGVEVHNAKTKPREEQYASTYRVVSVLTVLHQDWL | |
| | EPKSS)-[VPLSLY]- | NGKEYKCKVSNKALPAPIEKTISKAKGQPREPQVYTLPPCRDELTKNQVSL | |
| | hIL2(R38A, F42A, | WCLVKGFYPSDIAVEWESNGQPENNYKTTPPVLDSDGSFFLYSKLTVDK | |
| | Y45A, E62A, | SRWQQGNVFSCSVMHEALHNHYTQKSLSLSPG | |
| | C125A) | | |
| [symbol] A552 | Knob: | AKTEPKSSDKTHTCPPCPAPELLGGPSVFLFPPKPKDTLMISRTPEVTCVV | GSPG |
| | hFcIgG1(N297A + | VDVSHEDPEVKFNWYVDGVEVHNAKTKPREEQYASTYRVVSVLTVLHQ | |
| | AKTEPKSS)- | DWLNGKEYKCKVSNKALPAPIEKTISKAKGQPREPQVYTLPPCRDELTKN | |
| | Knob: -[VPLSLY]- | QVSLWCLVKGFYPSDIAVEWESNGQPENNYKTTPPVLDSDGSFFLYSKL | |
| | hIL2(R38A, F42A, | TVDKSRWQQGNVFSCSVMHEALHNHYTQKSLSLSPG | |
| | Y45A, E62A, | | |
| | C125A) | | |
| [symbol] A553 | Hole: | DKTHTCPPCPAPELLGGPSVFLFPPKPKDTLMISRTPEVTCVVVDVSHED | GPPSGSSPG |
| | hFc(N297A)- | PEVKFNWYVDGVEVHNAKTKPREEQYASTYRVVSVLTVLHQDWLNGK | |
| | [DSGGFMLT]- | EYKCKVSNKALPAPIEKTISKAKGQPREPQVCTLPPSRDELTKNQVSLSCA | |
| | hCD122 | VKGFYPSDIAVEWESNGQPENNYKTTPPVLDSDGSFFLVSKLTVDKSRW | |
| | | QQGNVFSCSVMHEALHNHYTQKSLSLSPG | |
| [symbol] A554 | Knob: | DKTHTCPPCPAPELLGGPSVFLFPPKPKDTLMISRTPEVTCVVVDVSHED | GSPG |
| | hFc(N297A)- | PEVKFNWYVDGVEVHNAKTKPREEQYASTYRVVSVLTVLHQDWLNGK | |
| | [VPLSLY]- | EYKCKVSNKALPAPIEKTISKAKGQPREPQVYTLPPCRDELTKNQVSLWC | |
| | hIL2(E15R, L18C, | LVKGFYPSDIAVEWESNGQPENNYKTTPPVLDSDGSFFLYSKLTVDKSR | |
| | D20R, R38A, | WQQGNVFSCSVMHEALHNHYTQKSLSLSPG | |
| | F42A, Y45A, | | |
| | E62A) | | |
| [symbol] A563 | Knob: | DKTHTCPPCPAPELLGGPSVFLFPPKPKDTLMISRTPEVTCVVVDVSHED | GSPG |
| | hFc(N297A)- | PEVKFNWYVDGVEVHNAKTKPREEQYASTYRVVSVLTVLHQDWLNGK | |
| | [VPLSLY]- | EYKCKVSNKALPAPIEKTISKAKGQPREPQVYTLPPCRDELTKNQVSLWC | |
| | hIL2(E15R, L18C, | LVKGFYPSDIAVEWESNGQPENNYKTTPPVLDSDGSFFLYSKLTVDKSR | |
| | D20R, R38A, | WQQGNVFSCSVMHEALHNHYTQKSLSLSPG | |
| | F42A, Y45A, | | |
| | E62A, N88L) | | |
| [symbol] A565 | Knob: | DKTHTCPPCPAPELLGGPSVFLFPPKPKDTLMISRTPEVTCVVVDVSHED | GSSPG |
| | hFc(N297A)- | PEVKFNWYVDGVEVHNAKTKPREEQYASTYRVVSVLTVLHQDWLNGK | |
| | [VPLSLY]- | EYKCKVSNKALPAPIEKTISKAKGQPREPQVYTLPPCRDELTKNQVSLWC | |
| | hIL2(E15R, L18C, | LVKGFYPSDIAVEWESNGQPENNYKTTPPVLDSDGSFFLYSKLTVDKSR | |
| | D20R, R38A, | WQQGNVFSCSVMHEALHNHYTQKSLSLSPG | |
| | F42A, Y45A, | | |
| | N88L) | | |
| [symbol] A566 | Knob: | DKTHTCPPCPAPELLGGPSVFLFPPKPKDTLMISRTPEVTCVVVDVSHED | GSPG |
| | hFc(N297A)- | PEVKFNWYVDGVEVHNAKTKPREEQYASTYRVVSVLTVLHQDWLNGK | |
| | [VPLSLY]- | EYKCKVSNKALPAPIEKTISKAKGQPREPQVYTLPPCRDELTKNQVSLWC | |
| | hIL2(E15R, L18C, | LVKGFYPSDIAVEWESNGQPENNYKTTPPVLDSDGSFFLYSKLTVDKSR | |
| | R38A, F42A, | WQQGNVFSCSVMHEALHNHYTQKSLSLSPG | |
| | Y45A, E62A | | |
| | N88L) | | |
| [symbol] A567 | Knob: | DKTHTCPPCPAPELLGGPSVFLFPPKPKDTLMISRTPEVTCVVVDVSHED | GSPG |
| | hFc(N297A)- | PEVKFNWYVDGVEVHNAKTKPREEQYASTYRVVSVLTVLHQDWLNGK | |
| | [VPLSLY]- | EYKCKVSNKALPAPIEKTISKAKGQPREPQVYTLPPCRDELTKNQVSLWC | |
| | hIL2(L18C, D20R, | LVKGFYPSDIAVEWESNGQPENNYKTTPPVLDSDGSFFLYSKLTVDKSR | |
| | R38A, F42A, | WQQGNVFSCSVMHEALHNHYTQKSLSLSPG | |
| | Y45A, E62A, | | |
| | N88L) | | |
| [symbol] A568 | Knob: | DKTHTCPPCPAPELLGGPSVFLFPPKPKDTLMISRTPEVTCVVVDVSHED | GSPG |
| | hFc(N297A)- | PEVKFNWYVDGVEVHNAKTKPREEQYASTYRVVSVLTVLHQDWLNGK | |
| | [VPLSLY]- | EYKCKVSNKALPAPIEKTISKAKGQPREPQVYTLPPCRDELTKNQVSLWC | |
| | hIL2(E15F, L18C, | LVKGFYPSDIAVEWESNGQPENNYKTTPPVLDSDGSFFLYSKLTVDKSR | |
| | D20R, R38A, | WQQGNVFSCSVMHEALHNHYTQKSLSLSPG | |
| | F42A, Y45A, | | |
| | E62A, N88L) | | |
| [symbol] A575 | Hole: | DKTHTCPPCPAPELLGGPSVFLFPPKPKDTLMASRTPEVTCVVVDVSHED | PGSGS |
| | hFc(N297A, | PEVKFNWYVDGVEVHNAKTKPREEQYASTYRVVSVLTVLHQDWLNGK | |
| | I253A)-hCD122 | EYKCKVSNKALPAPIEKTISKAKGQPREPQVCTLPPSRDELTKNQVSLSCA | |
| | | VKGFYPSDIAVEWESNGQPENNYKTTPPVLDSDGSFFLVSKLTVDKSRW | |
| | | QQGNVFSCSVMHEALHNHYTQKSLSLSPG | |
| [symbol] A576 | Hole: | DKTHTCPPCPAPELLGGPSVFLFPPKPKDTLYITREPEVTCVVVDVSHEDP | PGSGS |
| | hFc(N297A, | EVKFNWYVDGVEVHNAKTKPREEQYASTYRVVSVLTVLHQDWLNGKE | |
| | M252Y, S254T, | YKCKVSNKALPAPIEKTISKAKGQPREPQVCTLPPSRDELTKNQVSLSCAV | |
| | T256E)-hCD122 | KGFYPSDIAVEWESNGQPENNYKTTPPVLDSDGSFFLVSKLTVDKSRWQ | |
| | | QGNVFSCSVMHEALHNHYTQKSLSLSPG | |
| [symbol] A577 | Knob: hFc(N297, | DKTHTCPPCPAPELLGGPSVFLFPPKPKDTLMASRTPEVTCVVVDVSHED | GGSSPPGGGSSG |
| | I253A)- | PEVKFNWYVDGVEVHNAKTKPREEQYASTYRVVSVLTVLHQDWLNGK | GGSGP |
| | hIL2(R38A, F42A, | EYKCKVSNKALPAPIEKTISKAKGQPREPQVYTLPPCRDELTKNQVSLWC | |
| | Y45A, E62A, | LVKGFYPSDIAVEWESNGQPENNYKTTPPVLDSDGSFFLYSKLTVDKSR | |
| | C125A) | WQQGNVFSCSVMHEALHNHYTQKSLSLSPG | |
| [symbol] A578 | Knob: | DKTHTCPPCPAPELLGGPSVFLFPPKPKDTLYITREPEVTCVVVDVSHEDP | GGSSPPGGGSSG |
| | hFc(N297A, | EVKFNWYVDGVEVHNAKTKPREEQYASTYRVVSVLTVLHQDWLNGKE | GGSGP |
| | M252Y, S254T, | YKCKVSNKALPAPIEKTISKAKGQPREPQVYTLPPCRDELTKNQVSLWCL | |
| | T256E)- | VKGFYPSDIAVEWESNGQPENNYKTTPPVLDSDGSFFLYSKLTVDKSRW | |
| | hIL2(R38A, F42A, | QQGNVFSCSVMHEALHNHYTQKSLSLSPG | |
| | Y45A, E62A, | | |
| | C125A) | | |
| [symbol] A579 | Knob: (297, | DKTHTCPPCPAPELLGGPSVFLFPPKPKDTLMASRTPEVTCVVVDVSHED | GSPG |
| | I253A)-[VPLSLY]- | PEVKFNWYVDGVEVHNAKTKPREEQYASTYRVVSVLTVLHQDWLNGK | |
| | hIL2(R38A, F42A, | EYKCKVSNKALPAPIEKTISKAKGQPREPQVYTLPPCRDELTKNQVSLWC | |
| | Y45A, E62A, | LVKGFYPSDIAVEWESNGQPENNYKTTPPVLDSDGSFFLYSKLTVDKSR | |
| | C125A) | WQQGNVFSCSVMHEALHNHYTQKSLSLSPG | |
| [symbol] A580 | Knob: | DKTHTCPPCPAPELLGGPSVFLFPPKPKDTLYITREPEVTCVVVDVSHEDP | GSPG |
| | hFc(N297A, | EVKFNWYVDGVEVHNAKTKPREEQYASTYRVVSVLTVLHQDWLNGKE | |
| | M252Y, S254T, | YKCKVSNKALPAPIEKTISKAKGQPREPQVYTLPPCRDELTKNQVSLWCL | |
| | T256E)-[VPLSLY]- | VKGFYPSDIAVEWESNGQPENNYKTTPPVLDSDGSFFLYSKLTVDKSRW | |
| | hIL2(R38A, F42A, | QQGNVFSCSVMHEALHNHYTQKSLSLSPG | |
| | Y45A, E62A, | | |
| | C125A) | | |
| [symbol] A581 | Knob: | DKTHTCPPCPAPELLGGPSVFLFPPKPKDTLMISRTPEVTCVVVDVSHED | GSPG |
| | hFc(N2971)- | PEVKFNWYVDGVEVHNAKTKPREEQYASTYRVVSVLTVLHQDWLNGK | |
| | [VPLSLY]- | EYKCKVSNKALPAPIEKTISKAKGQPREPQVYTLPPCRDELTKNQVSLWC | |
| | hIL2(L18C, R38A, | LVKGFYPSDIAVEWESNGQPENNYKTTPPVLDSDGSFFLYSKLTVDKSR | |
| | F42A, Y45A, | WQQGNVFSCSVMHEALHNHYTQKSLSLSPG | |
| | E62A) | | |
| [symbol] A582 | Knob: | DKTHTCPPCPAPELLGGPSVFLFPPKPKDTLMISRTPEVTCVVVDVSHED | GSPG |
| | hFc(N297A)- | PEVKFNWYVDGVEVHNAKTKPREEQYASTYRVVSVLTVLHQDWLNGK | |
| | [VPLSLY]- | EYKCKVSNKALPAPIEKTISKAKGQPREPQVYTLPPCRDELTKNQVSLWC | |
| | hIL2(H16Y, | LVKGFYPSDIAVEWESNGQPENNYKTTPPVLDSDGSFFLYSKLTVDKSR | |
| | R38A, F42A, | WQQGNVFSCSVMHEALHNHYTQKSLSLSPG | |
| | Y45A, E62A, | | |
| | C125A) | | |
| [symbol] A583 | Knob: | DKTHTCPPCPAPELLGGPSVFLFPPKPKDTLMISRTPEVTCVVVDVSHED | GSPG |
| | hFc(N297A)- | PEVKFNWYVDGVEVHNAKTKPREEQYASTYRVVSVLTVLHQDWLNGK | |
| | [VPLSLY]- | EYKCKVSNKALPAPIEKTISKAKGQPREPQVYTLPPCRDELTKNQVSLWC | |
| | hIL2(H16E, | LVKGFYPSDIAVEWESNGQPENNYKTTPPVLDSDGSFFLYSKLTVDKSR | |
| | R38A, F42A, | WQQGNVFSCSVMHEALHNHYTQKSLSLSPG | |
| | Y45A, E62A, | | |
| | C125A) | | |
| [symbol] A584 | Knob: | DKTHTCPPCPAPELLGGPSVFLFPPKPKDTLMISRTPEVTCVVVDVSHED | GSPG |
| | hFc(N297A)- | PEVKFNWYVDGVEVHNAKTKPREEQYASTYRVVSVLTVLHQDWLNGK | |
| | [VPLSLY]- | EYKCKVSNKALPAPIEKTISKAKGQPREPQVYTLPPCRDELTKNQVSLWC | |
| | hIL2(D20L, R38A, | LVKGFYPSDIAVEWESNGQPENNYKTTPPVLDSDGSFFLYSKLTVDKSR | |
| | F42A, Y45A, | WQQGNVFSCSVMHEALHNHYTQKSLSLSPG | |
| | E62A, C125A) | | |
| [symbol] A585 | Knob: | DKTHTCPPCPAPELLGGPSVFLFPPKPKDTLMISRTPEVTCVVVDVSHED | GSPG |
| | hFc(N297A)- | PEVKFNWYVDGVEVHNAKTKPREEQYASTYRVVSVLTVLHQDWLNGK | |
| | [VPLSLY]- | EYKCKVSNKALPAPIEKTISKAKGQPREPQVYTLPPCRDELTKNQVSLWC | |
| | hIL2(H16Y, L18C, | LVKGFYPSDIAVEWESNGQPENNYKTTPPVLDSDGSFFLYSKLTVDKSR | |
| | R38A, F42A, | WQQGNVFSCSVMHEALHNHYTQKSLSLSPG | |
| | Y45A, E62A) | | |
| [symbol] A586 | | DKTHTCPPCPAPELLGGPSVFLFPPKPKDTLMISRTPEVTCVVVDVSHED | GSPG |
| | | PEVKFNWYVDGVEVHNAKTKPREEQYASTYRVVSVLTVLHQDWLNGK | |
| | | EYKCKVSNKALPAPIEKTISKAKGQPREPQVYTLPPCRDELTKNQVSLWC | |
| | | LVKGFYPSDIAVEWESNGQPENNYKTTPPVLDSDGSFFLYSKLTVDKSR | |
| | | WQQGNVFSCSVMHEALHNHYTQKSLSLSPG | |
| [symbol] A587 | Knob: | DKTHTCPPCPAPELLGGPSVFLFPPKPKDTLMISRTPEVTCVVVDVSHED | GSPG |
| | hFc(N297A)- | PEVKFNWYVDGVEVHNAKTKPREEQYASTYRVVSVLTVLHQDWLNGK | |
| | [VPLSLY]- | EYKCKVSNKALPAPIEKTISKAKGQPREPQVYTLPPCRDELTKNQVSLWC | |
| | hIL2(L18C,, D20L, | LVKGFYPSDIAVEWESNGQPENNYKTTPPVLDSDGSFFLYSKLTVDKSR | |
| | R38A, F42A, | WQQGNVFSCSVMHEALHNHYTQKSLSLSPG | |
| | Y45A, E62A) | | |
| [symbol] A588 | Knob: | DKTHTCPPCPAPELLGGPSVFLFPPKPKDTLMISRTPEVTCVVVDVSHED | GSPG |
| | hFc(N297A)- | PEVKFNWYVDGVEVHNAKTKPREEQYASTYRVVSVLTVLHQDWLNGK | |
| | [VPLSLY]- | EYKCKVSNKALPAPIEKTISKAKGQPREPQVYTLPPCRDELTKNQVSLWC | |
| | hIL2(H16Y, L18C, | LVKGFYPSDIAVEWESNGQPENNYKTTPPVLDSDGSFFLYSKLTVDKSR | |
| | D20L, R38A, | WQQGNVFSCSVMHEALHNHYTQKSLSLSPG | |
| | F42A, Y45A, | | |
| | E62A) | | |
| [symbol] A589 | Knob: | DKTHTCPPCPAPELLGGPSVFLFPPKPKDTLMISRTPEVTCVVVDVSHED | GSPG |
| | hFc(N297A)- | PEVKFNWYVDGVEVHNAKTKPREEQYASTYRVVSVLTVLHQDWLNGK | |
| | [VPLSLY]- | EYKCKVSNKALPAPIEKTISKAKGQPREPQVYTLPPCRDELTKNQVSLWC | |
| | hIL2(H16E, L18C, | LVKGFYPSDIAVEWESNGQPENNYKTTPPVLDSDGSFFLYSKLTVDKSR | |
| | D20L, R38A, | WQQGNVFSCSVMHEALHNHYTQKSLSLSPG | |
| | F42A, Y45A, | | |
| | E62A) | | |
| [symbol] A603 | Hole: hFcIgG4- | ESKYGPPCPPCPAPEFLGGPSVFLFPPKPKDTLMISRTPEVTCVVVDVSQE | GSPG |
| | hCD122 | DPEVQFNWYVDGVEVHNAKTKPREEQFNSTYRVVSVLTVLHQDWLNG | |
| | | KEYKCKVSNKGLPSSIEKTISKAKGQPREPQVCTLPPSQEEMTKNQVSLSC | |
| | | AVKGFYPSDIAVEWESNGQPENNYKTTPPVLDSDGSFFLYSRLTVDKSR | |
| | | WQEGNVFSCSVMHEALHNHYTQKSLSLSLG | |
| [symbol] A604 | Knob: IgG4 hFc- | ESKYGPPCPPCPAPEFLGGPSVFLFPPKPKDTLMISRTPEVTCVVVDVSQE | GGSSPPGGGSSG |
| | hIL2(R38A, F42A, | DPEVQFNWYVDGVEVHNAKTKPREEQFNSTYRVVSVLTVLHQDWLNG | GGSGP |
| | Y45A, E62A, | KEYKCKVSNKGLPSSIEKTISKAKGQPREPQVYTLPPCQEEMTKNQVSLW | |
| | C125A) | CLVKGFYPSDIAVEWESNGQPENNYKTTPPVLDSDGSFFLYSRLTVDKSR | |
| | | WQEGNVFSCSVMHEALHNHYTQKSLSLSLG | |
| [symbol] A605 | Knob: hFcIgG4- | ESKYGPPCPPCPAPEFLGGPSVFLFPPKPKDTLMISRTPEVTCVVVDVSQE | GSPG |
| | hIL2-[VPLSLY]- | DPEVQFNWYVDGVEVHNAKTKPREEQFNSTYRVVSVLTVLHQDWLNG | |
| | hIL2(R38A, F42A, | KEYKCKVSNKGLPSSIEKTISKAKGQPREPQVYTLPPCQEEMTKNQVSLW | |
| | Y45A, E62A, | CLVKGFYPSDIAVEWESNGQPENNYKTTPPVLDSDGSFFLYSRLTVDKSR | |
| | C125A) | WQEGNVFSCSVMHEALHNHYTQKSLSLSLG | |
| [symbol] A606 | Hole: | DKTHTCPPCPAPELLGGPSVFLFPPKPKDTLMISRTPEVTCVVVDVSHED | GPPSGSSP |
| | hFc(N297A)- | PEVKFNWYVDGVEVHNAKTKPREEQYASTYRVVSVLTVLHQDWLNGK | |
| | [RAAAVKSP]- | EYKCKVSNKALPAPIEKTISKAKGQPREPQVCTLPPSRDELTKNQVSLSCA | |
| | hCD122 | VKGFYPSDIAVEWESNGQPENNYKTTPPVLDSDGSFFLVSKLTVDKSRW | |
| | | QQGNVFSCSVMHEALHNHYTQKSLSLSPG | |
| [symbol] A608 | Hole: | DKTHTCPPCPAPELLGGPSVFLFPPKPKDTLMASRTPEVTCVVVDVSHED | GPPSGSSP |
| | hFc(N297A, | PEVKFNWYVDGVEVHNAKTKPREEQYASTYRVVSVLTVLHQDWLNGK | |
| | I253A)- | EYKCKVSNKALPAPIEKTISKAKGQPREPQVCTLPPSRDELTKNQVSLSCA | |
| | [MPYDLYHP]- | VKGFYPSDIAVEWESNGQPENNYKTTPPVLDSDGSFFLVSKLTVDKSRW | |
| | hCD122 | QQGNVFSCSVMHEALHNHYTQKSLSLSPG | |
| [symbol] A609 | Hole: | DKTHTCPPCPAPELLGGPSVFLFPPKPKDTLMASRTPEVTCVVVDVSHED | GPPSGSSPG |
| | hFc(N297A, | PEVKFNWYVDGVEVHNAKTKPREEQYASTYRVVSVLTVLHQDWLNGK | |
| | I253A)-[VPLSLY]- | EYKCKVSNKALPAPIEKTISKAKGQPREPQVCTLPPSRDELTKNQVSLSCA | |
| | hCD122 | VKGFYPSDIAVEWESNGQPENNYKTTPPVLDSDGSFFLVSKLTVDKSRW | |
| | | QQGNVFSCSVMHEALHNHYTQKSLSLSPG | |
| [symbol] A612 | Hole: | DKTHTCPPCPAPELLGGPSVFLFPPKPKDTLMISRTPEVTCVVVDVSHED | GPPSGSSP |
| | hFc(N297A)- | PEVKFNWYVDGVEVHNAKTKPREEQYASTYRVVSVLTVLHQDWLNGK | |
| | [MPYDLYHP]- | EYKCKVSNKALPAPIEKTISKAKGQPREPQVCTLPPSRDELTKNQVSLSCA | |
| | hCD122(C122S, | VKGFYPSDIAVEWESNGQPENNYKTTPPVLDSDGSFFLVSKLTVDKSRW | |
| | C168S) | QQGNVFSCSVMHEALHNHYTQKSLSLSPG | |
| [symbol] A614 | Hole: | DKTHTCPPCPAPELLGGPSVFLFPPKPKDTLMISRTPEVTCVVVDVSHED | GPPSGSSPG |
| | hFc(N297A)- | PEVKFNWYVDGVEVHNAKTKPREEQYASTYRVVSVLTVLHQDWLNGK | |
| | [DSGGFMLT]- | EYKCKVSNKALPAPIEKTISKAKGQPREPQVCTLPPSRDELTKNQVSLSCA | |
| | hCD122(C122S, | VKGFYPSDIAVEWESNGQPENNYKTTPPVLDSDGSFFLVSKLTVDKSRW | |
| | C168S) | QQGNVFSCSVMHEALHNHYTQKSLSLSPG | |
| [symbol] A621 | Hole: hFcIgG4- | ESKYGPPCPPCPAPEFLGGPSVFLFPPKPKDTLMISRTPEVTCVVVDVSQE | PSGSSPG |
| | [VPLSLY]-hCD122 | DPEVQFNWYVDGVEVHNAKTKPREEQFNSTYRVVSVLTVLHQDWLNG | |
| | | KEYKCKVSNKGLPSSIEKTISKAKGQPREPQVCTLPPSQEEMTKNQVSLSC | |
| | | AVKGFYPSDIAVEWESNGQPENNYKTTPPVLDSDGSFFLYSRLTVDKSR | |
| | | WQEGNVFSCSVMHEALHNHYTQKSLSLSLGGP | |
| [symbol] A623 | Knob: hFc(N297, | DKTHTCPPCPAPELLGGPSVFLFPPKPKDTLMASRTPEVTCVVVDVSHED | GGSSPP |
| | I253A)- | PEVKFNWYVDGVEVHNAKTKPREEQYASTYRVVSVLTVLHQDWLNGK | |
| | [MPYDLYHP]- | EYKCKVSNKALPAPIEKTISKAKGQPREPQVYTLPPCRDELTKNQVSLWC | |
| | hIL2(R38A, F42A, | LVKGFYPSDIAVEWESNGQPENNYKTTPPVLDSDGSFFLYSKLTVDKSR | |
| | Y45A, E62A, | WQQGNVFSCSVMHEALHNHYTQKSLSLSPG | |
| | C125A) | | |
| [symbol] A625 | Hole: | DKTHTCPPCPAPELLGGPSVFLFPPKPKDTLMASRTPEVTCVVVDVSHED | |
| | hFc(N297A, | PEVKFNWYVDGVEVHNAKTKPREEQYASTYRVVSVLTVLHQDWLNGK | |
| | I253A) | EYKCKVSNKALPAPIEKTISKAKGQPREPQVCTLPPSRDELTKNQVSLSCA | |
| | | VKGFYPSDIAVEWESNGQPENNYKTTPPVLDSDGSFFLVSKLTVDKSRW | |
| | | QQGNVFSCSVMHEALHNHYTQKSLSLSPG | |
| [symbol] A626 | Hole: hFcIgG4 | ESKYGPPCPPCPAPEFLGGPSVFLFPPKPKDTLMISRTPEVTCVVVDVSQE | |
| | | DPEVQFNWYVDGVEVHNAKTKPREEQFNSTYRVVSVLTVLHQDWLNG | |
| | | KEYKCKVSNKGLPSSIEKTISKAKGQPREPQVCTLPPSQEEMTKNQVSLSC | |
| | | AVKGFYPSDIAVEWESNGQPENNYKTTPPVLDSDGSFFLYSRLTVDKSR | |
| | | WQEGNVFSCSVMHEALHNHYTQKSLSLSLGPG | |
| [symbol] A669 | Hole: hFc- | DKTHTCPPCPAPELLGGPSVFLFPPKPKDTLMISRTPEVTCVVVDVSHED | PGSGS |
| | hCD122 | PEVKFNWYVDGVEVHNAKTKPREEQYNSTYRVVSVLTVLHQDWLNGK | |
| | | EYKCKVSNKALPAPIEKTISKAKGQPREPQVCTLPPSRDELTKNQVSLSCA | |
| | | VKGFYPSDIAVEWESNGQPENNYKTTPPVLDSDGSFFLVSKLTVDKSRW | |
| | | QQGNVFSCSVMHEALHNHYTQKSLSLSPG | |
| [symbol] A670 | Knob: hFc- | DKTHTCPPCPAPELLGGPSVFLFPPKPKDTLMISRTPEVTCVVVDVSHED | GGSSPPGGGSSG |
| | hIL2(R38A, F42A, | PEVKFNWYVDGVEVHNAKTKPREEQYNSTYRVVSVLTVLHQDWLNGK | GGSGP |
| | Y45A, E62A, | EYKCKVSNKALPAPIEKTISKAKGQPREPQVYTLPPCRDELTKNQVSLWC | |
| | C125A) | LVKGFYPSDIAVEWESNGQPENNYKTTPPVLDSDGSFFLYSKLTVDKSR | |
| | | WQQGNVFSCSVMHEALHNHYTQKSLSLSPG | |
| [symbol] A671 | Knob: hFc- | DKTHTCPPCPAPELLGGPSVFLFPPKPKDTLMISRTPEVTCVVVDVSHED | GSPG |
| | [VPLSLY]- | PEVKFNWYVDGVEVHNAKTKPREEQYNSTYRVVSVLTVLHQDWLNGK | |
| | hIL2(R38A, F42A, | EYKCKVSNKALPAPIEKTISKAKGQPREPQVYTLPPCRDELTKNQVSLWC | |
| | Y45A, E62A, | LVKGFYPSDIAVEWESNGQPENNYKTTPPVLDSDGSFFLYSKLTVDKSR | |
| | C125A) | WQQGNVFSCSVMHEALHNHYTQKSLSLSPG | |
| [symbol] A672 | Hole: hFcIgG4- | DKTHTCPPCPAPELLGGPSVFLFPPKPKDTLMISRTPEVTCVVVDVSHED | GPPSGSSPG |
| | [VPLSLY]-hCD122 | PEVKFNWYVDGVEVHNAKTKPREEQYNSTYRVVSVLTVLHQDWLNGK | |
| | | EYKCKVSNKALPAPIEKTISKAKGQPREPQVCTLPPSRDELTKNQVSLSCA | |
| | | VKGFYPSDIAVEWESNGQPENNYKTTPPVLDSDGSFFLVSKLTVDKSRW | |
| | | QQGNVFSCSVMHEALHNHYTQKSLSLSPG | |
| | | [symbol] me | Component3Sequence |
| | | [symbol] A158 | |
| | | [symbol] A187 | AVNGTSQFTCFYNSRANISCVWSQDGALQDTSCQVHAWPDRRRW [symbol] |
| | | | TCELLPVSQASWACNLILGAPDSQKLTTVDIVTLRVLCREGVRWRVM |
| | | | QDFKPFENLRLMAPISLQVVHVETHRCNISWEISQASHYFERHLEFEA |
| | | | LSPGHTWEEAPLLTLKQKQEWICLETLTPDTQYEFQVRVKPLQGEFTI |
| | | | SPWSQPLAFRTKPAALGKD |
| | | [symbol] A255 | APTSSSTKKTQLQLEHLLLDLQMILNGINNYKNPKLTAMLTAKFAMP [symbol] |
| | | | ATELKHLQCLEEALKPLEEVLNLAQSKNFHLRPRDLISNINVIVLELKGS |
| | | | TFMCEYADETATIVEFLNRWITFAQSIISTLT |
| | | [symbol] A263 | VPLSLY |
| | | [symbol] A278 | DSGGFMLT |
| | | [symbol] A281 | |
| | | [symbol] A440 | AVNGTSQFTCFYNSRANISCVWSQDGALQDTSCQVHAWPDRRRW [symbol] |
| | | | TCELLPVSQASWACNLILGAPDSQKLTTVDIVTLRVLCREGVRWRVM |
| | | | QDFKPFENLRLMAPISLQVVHVETHRSNISWEISQASHYFERHLEFEA |
| | | | LSPGHTWEEAPLLTLKQKQEWISLETLTPDTQYEFQVRVKPLQGEFTT |
| | | | SPWSQPLAFRTKPAALGKD |
| | | [symbol] A476 | NPMGSDPVNFKLLRVVNG |
| | | [symbol] A477 | APTSSSTKKTQLQLEHLLLDLQMILNGINNYKNPKLTAMLTAKFAMP [symbol] |
| | | | ATELKHLQCLEEALKPLEEVLNLAQSKNFHLRPRDLISNINVIVLELKGS |
| | | | TFMCEYADETATIVEFLNRWITFAQSIISTLT |
| | | [symbol] A478 | VPLSLY |
| | | [symbol] A479 | |
| | | [symbol] A480 | AVNGTSQFTCFYNSRANISCVWSQDGALQDTSCQVHAWPDRRRW [symbol] |
| | | | TCELLPVSQASWACNLILGAPDSQKLTTVDIVTLRVLCREGVRWRVM |
| | | | QDFKPFENLRLMAPISLQVVHVETHRCNISWEISQASHYFERHLEFEA |
| | | | LSPGHTWEEAPLLTLKQKQEWICLETLTPDTQYEFQVRVKPLQGEFTT |
| | | | SPWSQPLAFRTKPAALGKD |
| | | [symbol] A516 | DKTHTCPPCPAPELLGGPSVFLFPPKPKDTLMISRTPEVTCVVVDVSH |
| | | | PEVKFNWYVDGVEVHNAKTKPREEQYASTYRVVSVLTVLHQDWL [symbol] N |
| | | | EYKCKVSNKALPAPIEKTISKAKGQPREPQVCTLPPSRDELTKNQVSLS |
| | | | VKGFYPSDIAVEWESNGQPENNYKTTPPVLDSDGSFFLVSKLTVDKS [symbol] |
| | | | QQGNVFSCSVMHEALHNHYTQKSLSLSPG |
| | | [symbol] A520 | |
| | | [symbol] A521 | AVNGTSQFTCFYNSRANISCVWSQDGALQDTSCQVHAWPDRRRW [symbol] |
| | | | TCELLPVSQASWACNLILGAPDSQKLTTVDIVTLRVLCREGVRWRVM |
| | | | QDFKPFENLRLMAPISLQVVHVETHRCNISWEISQASHYFERHLEFEA |
| | | | LSPGHTWEEAPLLTLKQKQEWICLETLTPDTQYEFQVRVKPLQGEFT [symbol] |
| | | | SPWSQPLAFRTKPAALGKD |
| | | [symbol] A522 | AVKNCSHLECFYNSRANVSCMWSHEEALNVTTCHVHAKSNLRHWN |
| | | | CELTLVRQASWACNLILGSFPESQSLTSVDLLDINVVCWEEKGWRRV [symbol] |
| | | | CDFHPFDNLRLVAPHSLQVLHIDTQRCNISWKVSQVSHYIEPYLEFEA [symbol] |
| | | | RLLGHSWEDASVLSLKQRQQWLFLEMLIPSTSYEVQVRVKAQRNNT [symbol] |
| | | | WSPWSQPLTFRTRPADPMKE |
| | | [symbol] A528 | AVNGTSQFTCFYNSRANISCVWSQDGALQDTSCQVHAWPDRRRW [symbol] |
| | | | TCELLPVSQASWACNLILGAPDSQKLTTVDIVTLRVLCREGVRWRVM |
| | | | QDFKPFENLRLMAPISLQVVHVETHRCNISWEISQASHYFERHLEFEA |
| | | | LSPGHTWEEAPLLTLKQKQEWISLETLTPDTQYEFQVRVKPLQGEFTT |
| | | | SPWSQPLAFRTKPAALGKD |
| | | [symbol] A530 | APTSSSTKKTQLQLEHLLLDLQMILNGINNYKNPKLTAMLTAKFAMP [symbol] |
| | | | ATELKHLQCLEEALKPLEEVLNLAQSKNFHLRPRDLISNINVIVLELKGS |
| | | | TFMCEYADETATIVEFLNRWITFAQSIISTLT |
| | | [symbol] A531 | VPLSLY |
| | | [symbol] A532 | |
| | | [symbol] A533 | AVNGTSQFTCFYNSRANISCVWSQDGALQDTSCQVHAWPDRRRW [symbol] |
| | | | TCELLPVSQASWACNLILGAPDSQKLTTVDIVTLRVLCREGVRWRVM |
| | | | QDFKPFENLRLMAPISLQVVHVETHRCNISWEISQASHYFERHLEFEA |
| | | | LSPGHTWEEAPLLTLKQKQEWICLETLTPDTQYEFQVRVKPLQGEFTT |
| | | | SPWSQPLAFRTKPAALGKD |
| | | [symbol] A534 | AVKNCSHLECFYNSRANVSCMWSHEEALNVTTCHVHAKSNLRHWN |
| | | | CELTLVRQASWACNLILGSFPESQSLTSVDLLDINVVCWEEKGWRRV [symbol] |
| | | | CDFHPFDNLRLVAPHSLQVLHIDTQRCNISWKVSQVSHYIEPYLEFEA [symbol] |
| | | | RLLGHSWEDASVLSLKQRQQWLFLEMLIPSTSYEVQVRVKAQRNNT [symbol] |
| | | | WSPWSQPLTFRTRPADPMKE |
| | | [symbol] A542 | APTSSSTKKTQLQLEHLLLDLQMILNGINNYKNPKLTAMLTAKFAMP [symbol] |
| | | | ATELKHLQCLEEALKPLEEVLNLAQSKNFHLRPRDLISNINVIVLELKGS |
| | | | TFMCEYADETATIVEFLNRWITFAQSIISTLT |
| | | [symbol] A543 | GVPLSLY |
| | | [symbol] A544 | VPLSLY |
| | | [symbol] A545 | APTSSSTKKTQLQLEHLLLDLQMILNGINNYKNPKLTAMLTAKFAMP [symbol] |
| | | | ATELKHLQCLEEALKPLEEVLNLAQSKNFHLRPRDLISNINVIVLELKGS |
| | | | TFMCEYADETATIVEFLNRWITFAQSIISTLT |
| | | [symbol] A546 | APTSSSTKKTQLQLEHLLLDLQMILNGINNYKNPKLTAMLTAKFAMP [symbol] |
| | | | ATELKHLQCLEEALKPLEEVLNLAQSKNFHFDPRDVVSNINVFVLELK [symbol] |
| | | | TTFMCEYADETATIVEFLNRWITFAQSIISTLT |
| | | [symbol] A547 | PGSGS |
| | | [symbol] A548 | PGSGS |
| | | [symbol] A549 | DKTHTCPPCPAPELLGGPSVFLFPPKPKDTLMISRTPEVTCVVVDVSH [symbol] |
| | | | PEVKFNWYVDGVEVHNAKTKPREEQYASTYRVVSVLTVLHQDWLN [symbol] |
| | | | EYKCKVSNKALPAPIEKTISKAKGQPREPQVCTLPPSRDELTKNQVSLS |
| | | | VKGFYPSDIAVEWESNGQPENNYKTTPPVLDSDGSFFLVSKLTVDKS [symbol] |
| | | | QQGNVFSCSVMHEALHNHYTQKSLSLSPG |
| | | [symbol] A550 | VPLSLY |
| | | [symbol] A551 | VPLSLY |
| | | [symbol] A552 | VPLSLY |
| | | [symbol] A553 | DSGGFMLT |
| | | [symbol] A554 | VPLSLY |
| | | [symbol] A563 | VPLSLY |
| | | [symbol] A565 | VPLSLY |
| | | [symbol] A566 | VPLSLY |
| | | [symbol] A567 | VPLSLY |
| | | [symbol] A568 | VPLSLY |
| | | [symbol] A575 | AVNGTSQFTCFYNSRANISCVWSQDGALQDTSCQVHAWPDRRRW [symbol] |
| | | | TCELLPVSQASWACNLILGAPDSQKLTTVDIVTLRVLCREGVRWRVM |
| | | | QDFKPFENLRLMAPISLQVVHVETHRCNISWEISQASHYFERHLEFEA |
| | | | LSPGHTWEEAPLLTLKQKQEWICLETLTPDTQYEFQVRVKPLQGEFTT |
| | | | SPWSQPLAFRTKPAALGKD |
| | | [symbol] A576 | AVNGTSQFTCFYNSRANISCVWSQDGALQDTSCQVHAWPDRRRW [symbol] |
| | | | TCELLPVSQASWACNLILGAPDSQKLTTVDIVTLRVLCREGVRWRVM |
| | | | QDFKPFENLRLMAPISLQVVHVETHRCNISWEISQASHYFERHLEFEA |
| | | | LSPGHTWEEAPLLTLKQKQEWICLETLTPDTQYEFQVRVKPLQGEFTT |
| | | | SPWSQPLAFRTKPAALGKD |
| | | [symbol] A577 | APTSSSTKKTQLQLEHLLLDLQMILNGINNYKNPKLTAMLTAKFAMP [symbol] |
| | | | ATELKHLQCLEEALKPLEEVLNLAQSKNFHLRPRDLISNINVIVLELKGS |
| | | | TFMCEYADETATIVEFLNRWITFAQSIISTLT |
| | | [symbol] A578 | APTSSSTKKTQLQLEHLLLDLQMILNGINNYKNPKLTAMLTAKFAMP [symbol] |
| | | | ATELKHLQCLEEALKPLEEVLNLAQSKNFHLRPRDLISNINVIVLELKGS |
| | | | TFMCEYADETATIVEFLNRWITFAQSIISTLT |
| | | [symbol] A579 | VPLSLY |
| | | [symbol] A580 | VPLSLY |
| | | [symbol] A581 | VPLSLY |
| | | [symbol] A582 | VPLSLY |
| | | [symbol] A583 | VPLSLY |
| | | [symbol] A584 | VPLSLY |
| | | [symbol] A585 | VPLSLY |
| | | [symbol] A586 | VPLSLY |
| | | [symbol] A587 | VPLSLY |
| | | [symbol] A588 | VPLSLY |
| | | [symbol] A589 | VPLSLY |
| | | [symbol] A603 | AVNGTSQFTCFYNSRANISCVWSQDGALQDTSCQVHAWPDRRRW [symbol] |
| | | | TCELLPVSQASWACNLILGAPDSQKLTTVDIVTLRVLCREGVRWRVM |
| | | | QDFKPFENLRLMAPISLQVVHVETHRCNISWEISQASHYFERHLEFEA |
| | | | LSPGHTWEEAPLLTLKQKQEWICLETLTPDTQYEFQVRVKPLQGEFTT |
| | | | SPWSQPLAFRTKPAALGKD |
| | | [symbol] A604 | APTSSSTKKTQLQLEHLLLDLQMILNGINNYKNPKLTAMLTAKFAMP [symbol] |
| | | | ATELKHLQCLEEALKPLEEVLNLAQSKNFHLRPRDLISNINVIVLELKGS |
| | | | TFMCEYADETATIVEFLNRWITFAQSIISTLT |
| | | [symbol] A605 | VPLSLY |
| | | [symbol] A606 | RAAAVKSP |
| | | [symbol] A608 | MPYDLYHP |
| | | [symbol] A609 | VPLSLY |
| | | [symbol] A612 | MPYDLYHP |
| | | [symbol] A614 | DSGGFMLT |
| | | [symbol] A621 | VPLSLY |
| | | [symbol] A623 | MPYDLYHP |
| | | [symbol] A625 | |
| | | [symbol] A626 | |
| | | [symbol] A669 | AVNGTSQFTCFYNSRANISCVWSQDGALQDTSCQVHAWPDRRRW [symbol] |
| | | | TCELLPVSQASWACNLILGAPDSQKLTTVDIVTLRVLCREGVRWRVM |
| | | | QDFKPFENLRLMAPISLQVVHVETHRCNISWEISQASHYFERHLEFEA |
| | | | LSPGHTWEEAPLLTLKQKQEWICLETLTPDTQYEFQVRVKPLQGEFTT |
| | | | SPWSQPLAFRTKPAALGKD |
| | | [symbol] A670 | APTSSSTKKTQLQLEHLLLDLQMILNGINNYKNPKLTAMLTAKFAMP [symbol] |
| | | | ATELKHLQCLEEALKPLEEVLNLAQSKNFHLRPRDLISNINVIVLELKGS |
| | | | TFMCEYADETATIVEFLNRWITFAQSIISTLT |
| | | [symbol] A671 | VPLSLY |
| | | [symbol] A672 | VPLSLY |
| [symbol] me | newnames | Component4Sequence | Component5Sequence |
| [symbol] A158 | Hole: | | |
| | hFc(N297A) | | |
| [symbol] A187 | Hole: | | |
| | hFc(N297A)- | | |
| | hCD122 | | |
| [symbol] A255 | Knob: | | |
| | hFc(N297A)- | | |
| | hIL2(R38A, F42A, | | |
| | Y45A, E62A, | | |
| | C125A) | | |
| [symbol] A263 | Knob: | SGP | APTSSSTKKTQLQLEHLLLDLQMILNGI |
| | hFc(N297A)- | | NNYKNPKLTAMLTAKFAMPKKATELKH |
| | [VPLSLY]- | | LQCLEEALKPLEEVLNLAQSKNFHLRPR |
| | hIL2(R38A, F42A, | | DLISNINVIVLELKGSETTFMCEYADETA |
| | Y45A, E62A, | | TIVEFLNRWITFAQSIISTLT |
| | C125A) | | |
| [symbol] A278 | Knob: | SGP | APTSSSTKKTQLQLEHLLLDLQMILNGI |
| | hFc(N297A)- | | NNYKNPKLTRMLTFKFYMPKKATELKH |
| | [DSGGFMLT]- | | LQCLEEELKPLEEVLNLAQSKNFHLRPR |
| | hIL2(C125A) | | DLISNINVIVLELKGSETTFMCEYADETA |
| | | | TIVEFLNRWITFAQSIISTLT |
| [symbol] A281 | Knob: | SGP | APTSSSTKKTQLQLEHLLLDLQMILNGI |
| | hFc(N297A)- | | NNYKNPKLTAMLTAKFAMPKKATELKH |
| | [DSGGFMLT]- | | LQCLEEALKPLEEVLNLAQSKNFHLRPR |
| | hIL2(R38A, F42A, | | DLISNINVIVLELKGSETTFMCEYADETA |
| | Y45A, E62A, | | TIVEFLNRWITFAQSIISTLT |
| | C125A) | | |
| [symbol] A440 | Hole: | | |
| | hFc(N297A)- | | |
| | hCD122(C122S, | | |
| | C168S) | | |
| [symbol] A476 | Knob: | GP | APTSSSTKKTQLQLEHLLLDLQMILNGI |
| | hFc(N297A)- | | NNYKNPKLTRMLTSKFYMPKKATELKH |
| | [NPMGSDPVNFK | | LQCLEESLKPLEEVLNLAQSKNFHLRPR |
| | LLRVVNG]- | | DLISNINVIVLELKGSETTFMCEYADETA |
| | hIL2(F42S, E62S, | | TIVEFLNRWITFAQSIISTLT |
| | C125A) | | |
| [symbol] A477 | Knob: | | |
| | mFcIgG2a(LALAPG)- | | |
| | hIL2(R38A, | | |
| | F42A, Y45A, | | |
| | E62A, C125A) | | |
| [symbol] A478 | Knob: | SGP | APTSSSTKKTQLQLEHLLLDLQMILNGI |
| | mFcIgG2a(LALAPG)- | | NNYKNPKLTAMLTAKFAMPKKATELKH |
| | [VPLSLY]- | | LQCLEEALKPLEEVLNLAQSKNFHLRPR |
| | hIL2(R38A, F42A, | | DLISNINVIVLELKGSETTFMCEYADETA |
| | Y45A, E62A, | | TIVEFLNRWITFAQSIISTLT |
| | C125A) | | |
| [symbol] A479 | Hole: | | |
| | mFcIgG2a(LALAPG) | | |
| [symbol] A480 | Hole: | | |
| | mFcIgG2a(LALAPG)- | | |
| | hCD122 | | |
| [symbol] A516 | F8ScFvVersion1- | PGSGS | AVNGTSQFTCFYNSRANISCVWSQDG |
| | Hole: | | ALQDTSCQVHAWPDRRRWNQTCELL |
| | hFc(N297A)- | | PVSQASWACNLILGAPDSQKLTTVDIVT |
| | hCD122 | | LRVLCREGVRWRVMAIQDFKPFENLRL |
| | | | MAPISLQVVHVETHRCNISWEISQASH |
| | | | YFERHLEFEARTLSPGHTWEEAPLLTLK |
| | | | QKQEWICLETLTPDTQYEFQVRVKPLQ |
| | | | GEFTTWSPWSQPLAFRTKPAALGKD |
| [symbol] A520 | Hole: | | |
| | mFcIgG2a(LALAPG)- | | |
| | NoAnnotationFound | | |
| [symbol] A521 | Hole: | GHHHHHHHH | |
| | mFcIgG2a(LALAPG)- | | |
| | hCD122- | | |
| | NoAnnotationFound | | |
| [symbol] A522 | Hole: | GHHHHHHHH | |
| | mFcIgG2a(LALAPG)- | | |
| | mCD122- | | |
| | NoAnnotationFound | | |
| [symbol] A528 | Hole: | | |
| | hFc(N297A)- | | |
| | hCD122(C168S) | | |
| [symbol] A530 | Knob: | | |
| | mFcIgG1(DAPG)- | | |
| | hIL2(R38A, F42A, | | |
| | Y45A, E62A, | | |
| | C125A) | | |
| [symbol] A531 | Knob: | SGP | APTSSSTKKTQLQLEHLLLDLQMILNGI |
| | mFcIgG1(DAPG)- | | NNYKNPKLTAMLTAKFAMPKKATELKH |
| | [VPLSLY]- | | LQCLEEALKPLEEVLNLAQSKNFHLRPR |
| | hIL2(R38A, F42A, | | DLISNINVIVLELKGSETTFMCEYADETA |
| | Y45A, E62A, | | TIVEFLNRWITFAQSIISTLT |
| | C125A) | | |
| [symbol] A532 | Hole: | | |
| | mFcIgG1(DAPG) | | |
| [symbol] A533 | Hole: | | |
| | mFcIgG1(DAPG)- | | |
| | hCD122 | | |
| [symbol] A534 | Hole: | | |
| | mFcIgG1(DAPG)- | | |
| | mCD122 | | |
| [symbol] A542 | Knob: | | |
| | hFc(N297A)- | | |
| | hIL2(R38A, F42A, | | |
| | Y45A, E62A, | | |
| | C125A) | | |
| [symbol] A543 | Hole: | GSGGG | AVNGTSQFTCFYNSRANISCVWSQDG |
| | hFc(N297A)- | | ALQDTSCQVHAWPDRRRWNQTCELL |
| | [VPLSLY]- | | PVSQASWACNLILGAPDSQKLTTVDIVT |
| | hCD122 | | LRVLCREGVRWRVMAIQDFKPFENLRL |
| | | | MAPISLQVVHVETHRCNISWEISQASH |
| | | | YFERHLEFEARTLSPGHTWEEAPLLTLK |
| | | | QKQEWICLETLTPDTQYEFQVRVKPLQ |
| | | | GEFTTWSPWSQPLAFRTKPAALGKD |
| [symbol] A544 | Knob: | SGP | APTSSSTKKTQLQLEHLLLDLQMILNGI |
| | hFc(N297A)- | | NNYKNPKLTAMLTAKFAMPKKATELKH |
| | [VPLSLY]- | | LQCLEEALKPLEEVLNLAQSKNFHFDPR |
| | hIL2(R38A, F42A, | | DVVSNINVFVLELKGSETTFMCEYADET |
| | Y45A, E62A, | | ATIVEFLNRWITFAQSIISTLTAQ |
| | L80F, R81D, | | |
| | L85V, I86V, I92F, | | |
| | C125A) | | |
| [symbol] A545 | Knob: | | |
| | hFc(N297A)- | | |
| | hIL2(R38A, F42A, | | |
| | Y45A, E62A, | | |
| | C125A) | | |
| [symbol] A546 | Knob: | | |
| | hFc(N297A)- | | |
| | hIL2(R38A, F42A, | | |
| | Y45A, E62A, | | |
| | L80F, R81D, | | |
| | L85V, I86V, I92F, | | |
| | C125A) | | |
| [symbol] A547 | Hole: | AVNGTSQFTCFYNSRANISCVWSQDG | |
| | hFcIgG1(N297A + | ALQDTSCQVHAWPDRRRWNQTCELL | |
| | EPKSS)-Hole: | PVSQASWACNLILGAPDSQKLTTVDIV | |
| | hFc(N297A)- | TLRVLCREGVRWRVMAIQDFKPFENL | |
| | hCD122 | RLMAPISLQVVHVETHRCNISWEISQA | |
| | | SHYFERHLEFEARTLSPGHTWEEAPLLT | |
| | | LKQKQEWICLETLTPDTQYEFQVRVKP | |
| | | LQGEFTTWSPWSQPLAFRTKPAALGK | |
| | | D | |
| [symbol] A548 | Hole: | AVNGTSQFTCFYNSRANISCVWSQDG | |
| | hFcIgG1(N297A + | ALQDTSCQVHAWPDRRRWNQTCELL | |
| | AKT)-Hole: | PVSQASWACNLILGAPDSQKLTTVDIV | |
| | hFc(N297A)- | TLRVLCREGVRWRVMAIQDFKPFENL | |
| | hCD122 | RLMAPISLQVVHVETHRCNISWEISQA | |
| | | SHYFERHLEFEARTLSPGHTWEEAPLLT | |
| | | LKQKQEWICLETLTPDTQYEFQVRVKP | |
| | | LQGEFTTWSPWSQPLAFRTKPAALGK | |
| | | D | |
| [symbol] A549 | Hole: | PGSGS | AVNGTSQFTCFYNSRANISCVWSQDG |
| | hFcIgG1(N297A + | | ALQDTSCQVHAWPDRRRWNQTCELL |
| | AKTEPKSS)- | | PVSQASWACNLILGAPDSQKLTTVDIVT |
| | Hole: | | LRVLCREGVRWRVMAIQDFKPFENLRL |
| | hFcIgG1(N297A + | | MAPISLQVVHVETHRCNISWEISQASH |
| | EPKSS)-Hole: | | YFERHLEFEARTLSPGHTWEEAPLLTLK |
| | hFc(N297A)- | | QKQEWICLETLTPDTQYEFQVRVKPLQ |
| | hCD122 | | GEFTTWSPWSQPLAFRTKPAALGKD |
| [symbol] A550 | Knob: | SGP | APTSSSTKKTQLQLEHLLLDLQMILNGI |
| | hFcIgG1(N297A + | | NNYKNPKLTAMLTAKFAMPKKATELKH |
| | EPKSS)- | | LQCLEEALKPLEEVLNLAQSKNFHLRPR |
| | [VPLSLY]- | | DLISNINVIVLELKGSETTFMCEYADETA |
| | hIL2(R38A, F42A, | | TIVEFLNRWITFAQSIISTLT |
| | Y45A, E62A, | | |
| | C125A) | | APTSSSTKKTQLQLEHLLLDLQMILNGI |
| [symbol] A551 | Knob: | | NNYKNPKLTAMLTAKFAMPKKATELKH |
| | hFcIgG1(N297A + | SGP | LQCLEEALKPLEEVLNLAQSKNFHLRPR |
| | AKT)-[VPLSLY]- | | DLISNINVIVLELKGSETTFMCEYADETA |
| | hIL2(R38A, F42A, | | TIVEFLNRWITFAQSIISTLT |
| | Y45A, E62A, | | |
| | C125A) | | |
| [symbol] A552 | Knob: | SGP | APTSSSTKKTQLQLEHLLLDLQMILNGI |
| | hFcIgG1(N297A + | | NNYKNPKLTAMLTAKFAMPKKATELKH |
| | AKTEPKSS)- | | LQCLEEALKPLEEVLNLAQSKNFHLRPR |
| | Knob: -[VPLSLY]- | | DLISNINVIVLELKGSETTFMCEYADETA |
| | hIL2(R38A, F42A, | | TIVEFLNRWITFAQSIISTLT |
| | Y45A, E62A, | | |
| | C125A) | | |
| [symbol] A553 | Hole: | SGGG | AVNGTSQFTCFYNSRANISCVWSQDG |
| | hFc(N297A)- | | ALQDTSCQVHAWPDRRRWNQTCELL |
| | [DSGGFMLT]- | | PVSQASWACNLILGAPDSQKLTTVDIVT |
| | hCD122 | | LRVLCREGVRWRVMAIQDFKPFENLRL |
| | | | MAPISLQVVHVETHRCNISWEISQASH |
| | | | YFERHLEFEARTLSPGHTWEEAPLLTLK |
| | | | QKQEWICLETLTPDTQYEFQVRVKPLQ |
| | | | GEFTTWSPWSQPLAFRTKPAALGKD |
| [symbol] A554 | Knob: | SGP | APTSSSTKKTQLQLRHLCLRLQMILNGI |
| | hFc(N297A)- | | NNYKNPKLTAMLTAKFAMPKKATELKH |
| | [VPLSLY]- | | LQCLEEALKPLEEVLNLAQSKNFHLRPR |
| | hIL2(E15R, L18C, | | DLISNINVIVLELKGSETTFMCEYADETA |
| | D20R, R38A, | | TIVEFLNRWITFCQSIISTLT |
| | F42A, Y45A, | | |
| | E62A) | | |
| [symbol] A563 | Knob: | | APTSSSTKKTQLQLRHLCLRLQMILNGI |
| | hFc(N297A)- | | NNYKNPKLTAMLTAKFAMPKKATELKH |
| | [VPLSLY]- | | LQCLEEALKPLEEVLNLAQSKNFHLRPR |
| | hIL2(E15R, L18C, | | DLISLINVIVLELKGSETTFMCEYADETA |
| | D20R, R38A, | | TIVEFLNRWITFCQSIISTLT |
| | F42A, Y45A, | | |
| | E62A, N88L) | | |
| [symbol] A565 | Knob: | | APTSSSTKKTQLQLLHLCLRLQMILNGI |
| | hFc(N297A)- | | NNYKNPKLTAMLTAKFAMPKKATELKH |
| | [VPLSLY]- | | LQCLEEALKPLEEVLNLAQSKNFHLRPR |
| | hIL2(E15L, L18C, | | DLISLINVIVLELKGSETTFMCEYADETA |
| | D20R, R38A, | | TIVEFLNRWITFCQSIISTLT |
| | F42A, Y45A, | | |
| | E62A, N88L) | | |
| [symbol] A566 | Knob: | | APTSSSTKKTQLQLRHLCLDLQMILNGI |
| | hFc(N297A)- | | NNYKNPKLTAMLTAKFAMPKKATELKH |
| | [VPLSLY]- | | LQCLEEALKPLEEVLNLAQSKNFHLRPR |
| | hIL2(E15R, L18C, | | DLISLINVIVLELKGSETTFMCEYADETA |
| | R38A, F42A, | | TIVEFLNRWITFCQSIISTLT |
| | Y45A, E62A, | | |
| | N88L) | | |
| [symbol] A567 | Knob: | | APTSSSTKKTQLQLEHLCLRLQMILNGI |
| | hFc(N297A)- | | NNYKNPKLTAMLTAKFAMPKKATELKH |
| | [VPLSLY]- | | LQCLEEALKPLEEVLNLAQSKNFHLRPR |
| | hIL2(L18C, D20R, | | DLISLINVIVLELKGSETTFMCEYADETA |
| | R38A, F42A, | | TIVEFLNRWITFCQSIISTLT |
| | Y45A, E62A, | | |
| | N88L) | | |
| A [symbol] 568 | Knob: | | APTSSSTKKTQLQLFHLCLRLQMILNGI |
| | hFc(N297A)- | | NNYKNPKLTAMLTAKFAMPKKATELKH |
| | [VPLSLY]- | | LQCLEEALKPLEEVLNLAQSKNFHLRPR |
| | hIL2(E15F, L18C, | | DLISLINVIVLELKGSETTFMCEYADETA |
| | D20R, R38A, | | TIVEFLNRWITFCQSIISTLT |
| | F42A, Y45A, | | |
| | E62A, N88L) | | |
| [symbol] A575 | Hole: | | |
| | hFc(N297A, | | |
| | I253A)-hCD122 | | |
| [symbol] A576 | Hole: | | |
| | hFc(N297A, | | |
| | M252Y, S254T, | | |
| | T256E)-hCD122 | | |
| [symbol] A577 | Knob: hFc(N297, | | |
| | I253A)- | | |
| | hIL2(R38A, F42A, | | |
| | Y45A, E62A, | | |
| | C125A) | | |
| [symbol] A578 | Knob: | | |
| | hFc(N297A, | | |
| | M252Y, S254T, | | |
| | T256E)- | | |
| | hIL2(R38A, F42A, | | |
| | Y45A, E62A, | | |
| | C125A) | | |
| [symbol] A579 | Knob: hFc(N297, | SGP | APTSSSTKKTQLQLEHLLLDLQMILNGI |
| | I253A)-[VPLSLY]- | | NNYKNPKLTAMLTAKFAMPKKATELKH |
| | hIL2(R38A, F42A, | | LQCLEEALKPLEEVLNLAQSKNFHLRPR |
| | Y45A, E62A, | | DLISNINVIVLELKGSETTFMCEYADETA |
| | C125A) | | TIVEFLNRWITFAQSIISTLT |
| [symbol] A580 | Knob: | SGP | APTSSSTKKTQLQLEHLLLDLQMILNGI |
| | hFc(N297A, | | NNYKNPKLTAMLTAKFAMPKKATELKH |
| | M252Y, S254T, | | LQCLEEALKPLEEVLNLAQSKNFHLRPR |
| | T256E)-[VPLSLY]- | | DLISNINVIVLELKGSETTFMCEYADETA |
| | hIL2(R38A, F42A, | | TIVEFLNRWITFAQSIISTLT |
| | Y45A, E62A, | | |
| | C125A) | | |
| [symbol] A581 | Knob: | SGP | APTSSSTKKTQLQLEHLCLDLQMILNGI |
| | hFc(N297A)- | | NNYKNPKLTAMLTAKFAMPKKATELKH |
| | VPLSLVI | | LQCLEEALKPLEEVLNLAQSKNFHLRPR |
| | hIL2(L18C, R38A, | | DLISNINVIVLELKGSETTFMCEYADETA |
| | F42A, Y45A, | | TIVEFLNRWITFCQSIISTLT |
| | E62A) | | |
| [symbol] A582 | Knob: | SGP | APTSSSTKKTQLQLEYLLLDLQMILNGIN |
| | hFc(N297A)- | | NYKNPKLTAMLTAKFAMPKKATELKHL |
| | [VPLSLY]- | | QCLEEALKPLEEVLNLAQSKNFHLRPRD |
| | hIL2(H16Y, | | LISNINVIVLELKGSETTFMCEYADETATI |
| | R38A, F42A, | | VEFLNRWITFAQSIISTLT |
| | Y45A, E62A, | | |
| | C125A) | | |
| [symbol] A583 | Knob: | SGP | APTSSSTKKTQLQLEELLLDLQMILNGIN |
| | hFc(N297A)- | | NYKNPKLTAMLTAKFAMPKKATELKHL |
| | [VPLSLY]- | | QCLEEALKPLEEVLNLAQSKNFHLRPRD |
| | hIL2(H16E, | | LISNINVIVLELKGSETTFMCEYADETATI |
| | R38A, F42A, | | VEFLNRWITFAQSIISTLT |
| | Y45A, E62A, | | |
| | C125A) | | |
| [symbol] A584 | Knob: | | APTSSSTKKTQLQLEHLLLLLQMILNGIN |
| | hFc(N297A)- | | NYKNPKLTAMLTAKFAMPKKATELKHL |
| | [VPLSLY]- | SGP | QCLEEALKPLEEVLNLAQSKNFHLRPRD |
| | hIL2(D20L, R38A, | | LISNINVIVLELKGSETTFMCEYADETATI |
| | F42A, Y45A | | VEFLNRWITFAQSIISTLT |
| | E62A, C125A) | | |
| [symbol] A585 | Knob: | SGP | APTSSSTKKTQLQLEYLCLDLQMILNGI |
| | hFc(N297A)- | | NNYKNPKLTAMLTAKFAMPKKATELKH |
| | [VPLSLY]- | | LQCLEEALKPLEEVLNLAQSKNFHLRPR |
| | hIL2(H16Y, L18C | | DLISNINVIVLELKGSETTFMCEYADETA |
| | R38A, F42A, | | TIVEFLNRWITFCQSIISTLT |
| | Y45A, E62A) | | |
| [symbol] A586 | Knob: | SGP | APTSSSTKKTQLQLEELCLDLQMILNGI |
| | hFc(N297A)- | | NNYKNPKLTAMLTAKFAMPKKATELKH |
| | [VPLSLY]- | | LQCLEEALKPLEEVLNLAQSKNFHLRPR |
| | hIL2(H16E, L18C, | | DLISNINVIVLELKGSETTFMCEYADETA |
| | R38A, F42A, | | TIVEFLNRWITFCQSIISTLT |
| | Y45A, E62A) | | |
| [symbol] A587 | Knob: | SGP | APTSSSTKKTQLQLEHLCLLLQMILNGIN |
| | hFc(N297A)- | | NYKNPKLTAMLTAKFAMPKKATELKHL |
| | [VPLSLY]- | | QCLEEALKPLEEVLNLAQSKNFHLRPRD |
| | hIL2(L18C, D20L, | | LISNINVIVLELKGSETTFMCEYADETATI |
| | R38A, F42A, | | VEFLNRWITFCQSIISTLT |
| | Y45A, E62A) | | |
| [symbol] A588 | Knob: | SGP | APTSSSTKKTQLQLEYLCLLLQMILNGIN |
| | hFc(N297A)- | | NYKNPKLTAMLTAKFAMPKKATELKHL |
| | [VPLSLY]- | | QCLEEALKPLEEVLNLAQSKNFHLRPRD |
| | hIL2(H16Y, L18C, | | LISNINVIVLELKGSETTFMCEYADETATI |
| | D20L, R38A, | | VEFLNRWITFCQSIISTLT |
| | F42A, Y45A, | | |
| | E62A) | | |
| [symbol] A589 | Knob: | SGP | APTSSSTKKTQLQLEELCLLLQMILNGIN |
| | hFc(N297A)- | | NYKNPKLTAMLTAKFAMPKKATELKHL |
| | [VPLSLY]- | | QCLEEALKPLEEVLNLAQSKNFHLRPRD |
| | hIL2(H16E, L18C, | | LISNINVIVLELKGSETTFMCEYADETATI |
| | D20L, R38A, | | VEFLNRWITFCQSIISTLT |
| | F42A, Y45A, | | |
| | E62A) | | |
| [symbol] A603 | Hole: hFcIgG4- | | |
| | hCD122 | | |
| [symbol] A604 | Knob: IgG4 hFc- | | |
| | hIL2(R38A, F42A, | | |
| | Y45A, E62A, | | |
| | C125A) | | |
| [symbol] A605 | Knob: hFcIgG4- | SGP | APTSSSTKKTQLQLEHLLLDLQMILNGI |
| | hIL2-[VPLSLY]- | | NNYKNPKLTAMLTAKFAMPKKATELKH |
| | hIL2(R38A, F42A, | | LQCLEEALKPLEEVLNLAQSKNFHLRPR |
| | Y45A, E62A, | | DLISNINVIVLELKGSETTFMCEYADETA |
| | C125A) | | TIVEFLNRWITFAQSIISTLT |
| [symbol] A606 | Hole: | SGGG | AVNGTSQFTCFYNSRANISCVWSQDG |
| | hFc(N297A)- | | ALQDTSCQVHAWPDRRRWNQTCELL |
| | [RAAAVKSP]- | | PVSQASWACNLILGAPDSQKLTTVDIVT |
| | hCD122 | | LRVLCREGVRWRVMAIQDFKPFENLRL |
| | | | MAPISLQVVHVETHRCNISWEISQASH |
| | | | YFERHLEFEARTLSPGHTWEEAPLLTLK |
| | | | QKQEWICLETLTPDTQYEFQVRVKPLQ |
| | | | GEFTTWSPWSQPLAFRTKPAALGKD |
| [symbol] A608 | Hole: | SGGG | AVNGTSQFTCFYNSRANISCVWSQDG |
| | hFc(N297A, | | ALQDTSCQVHAWPDRRRWNQTCELL |
| | I253A)- | | PVSQASWACNLILGAPDSQKLTTVDIVT |
| | [MPYDLYHP]- | | LRVLCREGVRWRVMAIQDFKPFENLRL |
| | hCD122 | | MAPISLQVVHVETHRCNISWEISQASH |
| | | | YFERHLEFEARTLSPGHTWEEAPLLTLK |
| | | | QKQEWICLETLTPDTQYEFQVRVKPLQ |
| | | | GEFTTWSPWSQPLAFRTKPAALGKD |
| [symbol] A609 | Hole: | GSGGG | AVNGTSQFTCFYNSRANISCVWSQDG |
| | hFc(N297A, | | ALQDTSCQVHAWPDRRRWNQTCELL |
| | I253A)-[VPLSLY]- | | PVSQASWACNLILGAPDSQKLTTVDIVT |
| | hCD122 | | LRVLCREGVRWRVMAIQDFKPFENLRL |
| | | | MAPISLQVVHVETHRCNISWEISQASH |
| | | | YFERHLEFEARTLSPGHTWEEAPLLTLK |
| | | | QKQEWICLETLTPDTQYEFQVRVKPLQ |
| | | | GEFTTWSPWSQPLAFRTKPAALGKD |
| [symbol] A612 | Hole: | SGGG | AVNGTSQFTCFYNSRANISCVWSQDG |
| | hFc(N297A)- | | ALQDTSCQVHAWPDRRRWNQTCELL |
| | [MPYDLYHP]- | | PVSQASWACNLILGAPDSQKLTTVDIVT |
| | hCD122(C122S, | | LRVLCREGVRWRVMAIQDFKPFENLRL |
| | C168S) | | MAPISLQVVHVETHRSNISWEISQASH |
| | | | YFERHLEFEARTLSPGHTWEEAPLLTLK |
| | | | QKQEWISLETLTPDTQYEFQVRVKPLQ |
| | | | GEFTTWSPWSQPLAFRTKPAALGKD |
| [symbol] A614 | Hole: | SGGG | AVNGTSQFTCFYNSRANISCVWSQDG |
| | hFc(N297A)- | | ALQDTSCQVHAWPDRRRWNQTCELL |
| | [DSGGFMLT]- | | PVSQASWACNLILGAPDSQKLTTVDIVT |
| | hCD122(C122S, | | LRVLCREGVRWRVMAIQDFKPFENLRL |
| | C168S) | | MAPISLQVVHVETHRSNISWEISQASH |
| | | | YFERHLEFEARTLSPGHTWEEAPLLTLK |
| | | | QKQEWISLETLTPDTQYEFQVRVKPLQ |
| | | | GEFTTWSPWSQPLAFRTKPAALGKD |
| [symbol] A621 | Hole: hFcIgG4- | GSGGG | AVNGTSQFTCFYNSRANISCVWSQDG |
| | [VPLSLY]- | | ALQDTSCQVHAWPDRRRWNQTCELL |
| | hCD122 | | PVSQASWACNLILGAPDSQKLTTVDIVT |
| | | | LRVLCREGVRWRVMAIQDFKPFENLRL |
| | | | MAPISLQVVHVETHRCNISWEISQASH |
| | | | YFERHLEFEARTLSPGHTWEEAPLLTLK |
| | | | QKQEWICLETLTPDTQYEFQVRVKPLQ |
| | | | GEFTTWSPWSQPLAFRTKPAALGKD |
| [symbol] A623 | Knob: hFc(N297, | SGP | APTSSSTKKTQLQLEHLLLDLQMILNGI |
| | I253A)- | | NNYKNPKLTAMLTAKFAMPKKATELKH |
| | [MPYDLYHP]- | | LQCLEEALKPLEEVLNLAQSKNFHLRPR |
| | hIL2(R38A, F42A, | | DLISNINVIVLELKGSETTFMCEYADETA |
| | Y45A, E62A, | | TIVEFLNRWITFAQSIISTLT |
| | C125A) | | |
| [symbol] A625 | Hole: | | |
| | hFc(N297A, | | |
| | I253A) | | |
| [symbol] A626 | Hole: hFcIgG4 | | |
| [symbol] A669 | Hole: hFc- | | |
| | hCD122 | | |
| [symbol] A670 | Knob: hFc- | | |
| | hIL2(R38A, F42A, | | |
| | Y45A, E62A, | | |
| | C125A) | | |
| [symbol] A671 | Knob: hFc- | SGP | APTSSSTKKTQLQLEHLLLDLQMILNGI |
| | [VPLSLY]- | | NNYKNPKLTAMLTAKFAMPKKATELKH |
| | hIL2(R38A, F42A, | | LQCLEEALKPLEEVLNLAQSKNFHLRPR |
| | Y45A, E62A, | | DLISNINVIVLELKGSETTFMCEYADETA |
| | C125A) | | TIVEFLNRWITFAQSIISTLT |
| [symbol] A672 | Hole: hFcIgG4- | GSGGG | AVNGTSQFTCFYNSRANISCVWSQDG |
| | [VPLSLY]- | | ALQDTSCQVHAWPDRRRWNQTCELL |
| | hCD122 | | PVSQASWACNLILGAPDSQKLTTVDIVT |
| | | | LRVLCREGVRWRVMAIQDFKPFENLRL |
| | | | MAPISLQVVHVETHRCNISWEISQASH |
| | | | YFERHLEFEARTLSPGHTWEEAPLLTLK |
| | | | QKQEWICLETLTPDTQYEFQVRVKPLQ |
| | | | GEFTTWSPWSQPLAFRTKPAALGKD |

| [symbol] me | FullSequence |
|---|---|
| [symbol] A158 | DKTHTCPPCPAPELLGGPSVFLFPPKPKDTLMISRTPEVTCVVVDVSHEDPEVKFNWYVDGVEVHNAKTKPREEQYA |
| | STYRVVSVLTVLHQDWLNGKEYKCKVSNKALPAPIEKTISKAKGQPREPQVCTLPPSRDELTKNQVSLSCAVKGFYPSD |
| | IAVEWESNGQPENNYKTTPPVLDSDGSFFLVSKLTVDKSRWQQGNVFSCSVMHEALHNHYTQKSLSLSPG |
| [symbol] A187 | DKTHTCPPCPAPELLGGPSVFLFPPKPKDTLMISRTPEVTCVVVDVSHEDPEVKFNWYVDGVEVHNAKTKPREEQYA |
| | STYRVVSVLTVLHQDWLNGKEYKCKVSNKALPAPIEKTISKAKGQPREPQVCTLPPSRDELTKNQVSLSCAVKGFYPSD |
| | IAVEWESNGQPENNYKTTPPVLDSDGSFFLVSKLTVDKSRWQQGNVFSCSVMHEALHNHYTQKSLSLSPGPGSGSA |
| | VNGTSQFTCFYNSRANISCVWSQDGALQDTSCQVHAWPDRRRWNQTCELLPVSQASWACNLILGAPDSQKLTTV |
| | DIVTLRVLCREGVRWRVMAIQDFKPFENLRLMAPISLQVVHVETHRCNISWEISQASHYFERHLEFEARTLSPGHTW |
| | EEAPLLTLKQKQEWICLETLTPDTQYEFQVRVKPLQGEFTTWSPWSQPLAFRTKPAALGKD |
| [symbol] A255 | DKTHTCPPCPAPELLGGPSVFLFPPKPKDTLMISRTPEVTCVVVDVSHEDPEVKFNWYVDGVEVHNAKTKPREEQYA |
| | STYRVVSVLTVLHQDWLNGKEYKCKVSNKALPAPIEKTISKAKGQPREPQVYTLPPCRDELTKNQVSLWCLVKGFYPS |
| | DIAVEWESNGQPENNYKTTPPVLDSDGSFFLYSKLTVDKSRWQQGNVFSCSVMHEALHNHYTQKSLSLSPGGGSSP |
| | PGGGSSGGGSGPAPTSSSTKKTQLQLEHLLLDLQMILNGINNYKNPKLTAMLTAKFAMPKKATELKHLQCLEEALKPL |
| | EEVLNLAQSKNFHLRPRDLISNINVIVLELKGSETTFMCEYADETATIVEFLNRWITFAQSIISTLT |
| [symbol] A263 | DKTHTCPPCPAPELLGGPSVFLFPPKPKDTLMISRTPEVTCVVVDVSHEDPEVKFNWYVDGVEVHNAKTKPREEQYA |
| | STYRVVSVLTVLHQDWLNGKEYKCKVSNKALPAPIEKTISKAKGQPREPQVYTLPPCRDELTKNQVSLWCLVKGFYPS |
| | DIAVEWESNGQPENNYKTTPPVLDSDGSFFLYSKLTVDKSRWQQGNVFSCSVMHEALHNHYTQKSLSLSPGGSPGV |
| | PLSLYSGPAPTSSSTKKTQLQLEHLLLDLQMILNGINNYKNPKLTAMLTAKFAMPKKATELKHLQCLEEALKPLEEVLNL |
| | AQSKNFHLRPRDLISNINVIVLELKGSETTFMCEYADETATIVEFLNRWITFAQSIISTLT |
| [symbol] A278 | DKTHTCPPCPAPELLGGPSVFLFPPKPKDTLMISRTPEVTCVVVDVSHEDPEVKFNWYVDGVEVHNAKTKPREEQYA |
| | STYRVVSVLTVLHQDWLNGKEYKCKVSNKALPAPIEKTISKAKGQPREPQVYTLPPCRDELTKNQVSLWCLVKGFYPS |
| | DIAVEWESNGQPENNYKTTPPVLDSDGSFFLYSKLTVDKSRWQQGNVFSCSVMHEALHNHYTQKSLSLSPGGSGPD |
| | SGGFMLTSGPAPTSSSTKKTQLQLEHLLLDLQMILNGINNYKNPKLTRMLTFKFYMPKKATELKHLQCLEEELKPLEEV |
| | LNLAQSKNFHLRPRDLISNINVIVLELKGSETTFMCEYADETATIVEFLNRWITFAQSIISTLT |
| [symbol] A281 | DKTHTCPPCPAPELLGGPSVFLFPPKPKDTLMISRTPEVTCVVVDVSHEDPEVKFNWYVDGVEVHNAKTKPREEQYA |
| | STYRVVSVLTVLHQDWLNGKEYKCKVSNKALPAPIEKTISKAKGQPREPQVYTLPPCRDELTKNQVSLWCLVKGFYPS |
| | DIAVEWESNGQPENNYKTTPPVLDSDGSFFLYSKLTVDKSRWQQGNVFSCSVMHEALHNHYTQKSLSLSPGGSGPD |
| | SGGFMLTSGPAPTSSSTKKTQLQLEHLLLDLQMILNGINNYKNPKLTAMLTAKFAMPKKATELKHLQCLEEALKPLEE |
| | VLNLAQSKNFHLRPRDLISNINVIVLELKGSETTFMCEYADETATIVEFLNRWITFAQSIISTLT |
| [symbol] A440 | DKTHTCPPCPAPELLGGPSVFLFPPKPKDTLMISRTPEVTCVVVDVSHEDPEVKFNWYVDGVEVHNAKTKPREEQYA |
| | STYRVVSVLTVLHQDWLNGKEYKCKVSNKALPAPIEKTISKAKGQPREPQVCTLPPSRDELTKNQVSLSCAVKGFYPSD |
| | IAVEWESNGQPENNYKTTPPVLDSDGSFFLVSKLTVDKSRWQQGNVFSCSVMHEALHNHYTQKSLSLSPGPGSGSA |
| | VNGTSQFTCFYNSRANISCVWSQDGALQDTSCQVHAWPDRRRWNQTCELLPVSQASWACNLILGAPDSQKLTTV |
| | DIVTLRVLCREGVRWRVMAIQDFKPFENLRLMAPISLQVVHVETHRSNISWEISQASHYFERHLEFEARTLSPGHTWE |
| | EAPLLTLKQKQEWISLETLTPDTQYEFQVRVKPLQGEFTTWSPWSQPLAFRTKPAALGKD |
| [symbol] A476 | DKTHTCPPCPAPELLGGPSVFLFPPKPKDTLMISRTPEVTCVVVDVSHEDPEVKFNWYVDGVEVHNAKTKPREEQYA |
| | STYRVVSVLTVLHQDWLNGKEYKCKVSNKALPAPIEKTISKAKGQPREPQVYTLPPCRDELTKNQVSLWCLVKGFYPS |
| | DIAVEWESNGQPENNYKTTPPVLDSDGSFFLYSKLTVDKSRWQQGNVFSCSVMHEALHNHYTQKSLSLSPGGNPM |
| | GSDPVNFKLLRVVNGGPAPTSSSTKKTQLQLEHLLLDLQMILNGINNYKNPKLTRMLTSKFYMPKKATELKHLQCLEE |
| | SLKPLEEVLNLAQSKNFHLRPRDLISNINVIVLELKGSETTFMCEYADETATIVEFLNRWITFAQSIISTLT |
| [symbol] A477 | TIKPCPPCKCPAPNAAGGPSVFIFPPKIKDVLMISLSPIVTCVVVDVSEDDPDVQISWFVNNVEVHTAQTQTHREDYN |
| | STLRVVSALPIQHQDWMSGKEFKCKVNNKDLGAPIERTISKPKGSVRAPQVYVLPPCEEEMTKKQVTLWCMVTDF |
| | MPEDIYVEWTNNGKTELNYKNTEPVLDSDGSYFMYSKLRVEKKNWVERNSYSCSVVHEGLHNHHTTKSFSRTPGGG |
| | SSPPGGGSSGGGSGPAPTSSSTKKTQLQLEHLLLDLQMILNGINNYKNPKLTAMLTAKFAMPKKATELKHLQCLEEAL |
| | KPLEEVLNLAQSKNFHLRPRDLISNINVIVLELKGSETTFMCEYADETATIVEFLNRWITFAQSIISTLT |
| [symbol] A478 | TIKPCPPCKCPAPNAAGGPSVFIFPPKIKDVLMISLSPIVTCVVVDVSEDDPDVQISWFVNNVEVHTAQTQTHREDYN |
| | STLRVVSALPIQHQDWMSGKEFKCKVNNKDLGAPIERTISKPKGSVRAPQVYVLPPCEEEMTKKQVTLWCMVTDF |
| | MPEDIYVEWTNNGKTELNYKNTEPVLDSDGSYFMYSKLRVEKKNWVERNSYSCSVVHEGLHNHHTTKSFSRTPGGS |
| | PGVPLSLYSGPAPTSSSTKKTQLQLEHLLLDLQMILNGINNYKNPKLTAMLTAKFAMPKKATELKHLQCLEEALKPLEE |
| | VLNLAQSKNFHLRPRDLISNINVIVLELKGSETTFMCEYADETATIVEFLNRWITFAQSIISTLT |
| [symbol] A479 | TIKPCPPCKCPAPNAAGGPSVFIFPPKIKDVLMISLSPIVTCVVVDVSEDDPDVQISWFVNNVEVHTAQTQTHREDYN |
| | STLRVVSALPIQHQDWMSGKEFKCKVNNKDLGAPIERTISKPKGSVRAPQVCVLPPPEEEMTKKQVTLSCAVTDFMP |
| | EDIYVEWTNNGKTELNYKNTEPVLDSDGSYFMVSKLRVEKKNWVERNSYSCSVVHEGLHNHHTTKSFSRTPG |
| [symbol] A480 | TIKPCPPCKCPAPNAAGGPSVFIFPPKIKDVLMISLSPIVTCVVVDVSEDDPDVQISWFVNNVEVHTAQTQTHREDYN |
| | STLRVVSALPIQHQDWMSGKEFKCKVNNKDLGAPIERTISKPKGSVRAPQVCVLPPPEEEMTKKQVTLSCAVTDFMP |
| | EDIYVEWTNNGKTELNYKNTEPVLDSDGSYFMVSKLRVEKKNWVERNSYSCSVVHEGLHNHHTTKSFSRTPGPGSG |
| | SAVNGTSQFTCFYNSRANISCVWSQDGALQDTSCQVHAWPDRRRWNQTCELLPVSQASWACNLILGAPDSQKLTT |
| | VDIVTLRVLCREGVRWRVMAIQDFKPFENLRLMAPISLQVVHVETHRCNISWEISQASHYFERHLEFEARTLSPGHT |
| | WEEAPLLTLKQKQEWICLETLTPDTQYEFQVRVKPLQGEFTTWSPWSQPLAFRTKPAALGKD |
| [symbol] A516 | EVQLLESGGGLVQPGGSLRLSCAASGFTFSLFTMSVVVRQAPGKGLEVVVSAISGSGGSTYYADSVKGRFTISRDNSK |
| | NTLYLQMNSLRAEDTAVYYCAKSTHLYLFDYWGQGTLVTVSSGGGGSGGGGSGGGGSEIVLTQSPGTLSLSPGERAT |
| | LSCRASQSVSMPFLAWYQQKPGQAPRLLIYGASSRATGIPDRFSGSGSGTDFTLTISRLEPEDFAVYYCQQMRGRPPT |
| | FGQGTKVEIKGGSDKTHTCPPCPAPELLGGPSVFLFPPKPKDTLMISRTPEVTCVVVDVSHEDPEVKFNWYVDGVEV |
| | HNAKTKPREEQYASTYRVVSVLTVLHQDWLNGKEYKCKVSNKALPAPIEKTISKAKGQPREPQVCTLPPSRDELTKNQ |
| | VSLSCAVKGFYPSDIAVEWESNGQPENNYKTTPPVLDSDGSFFLVSKLTVDKSRWQQGNVFSCSVMHEALHNHYTQ |
| | KSLSLSPGPGSGSAVNGTSQFTCFYNSRANISCVWSQDGALQDTSCQVHAWPDRRRWNQTCELLPVSQASWACN |
| | LILGAPDSQKLTTVDIVTLRVLCREGVRWRVMAIQDFKPFENLRLMAPISLQVVHVETHRCNISWEISQASHYFERHLE |
| | FEARTLSPGHTWEEAPLLTLKQKQEWICLETLTPDTQYEFQVRVKPLQGEFTTWSPWSQPLAFRTKPAALGKD |
| [symbol] A520 | TIKPCPPCKCPAPNAAGGPSVFIFPPKIKDVLMISLSPIVTCVVVDVSEDDPDVQISWFVNNVEVHTAQTQTHREDYN |
| | STLRVVSALPIQHQDWMSGKEFKCKVNNKDLGAPIERTISKPKGSVRAPQVCVLPPPEEEMTKKQVTLSCAVTDFMP |
| | EDIYVEWTNNGKTELNYKNTEPVLDSDGSYFMVSKLRVEKKNWVERNSYSCSVVHEGLHNHHTTKSFSRTPGHHHH |
| | HHHH |
| [symbol] A521 | TIKPCPPCKCPAPNAAGGPSVFIFPPKIKDVLMISLSPIVTCVVVDVSEDDPDVQISWFVNNVEVHTAQTQTHREDYN |
| | STLRVVSALPIQHQDWMSGKEFKCKVNNKDLGAPIERTISKPKGSVRAPQVCVLPPPEEEMTKKQVTLSCAVTDFMP |
| | EDIYVEWTNNGKTELNYKNTEPVLDSDGSYFMVSKLRVEKKNWVERNSYSCSVVHEGLHNHHTTKSFSRTPGPGSG |
| | SAVNGTSQFTCFYNSRANISCVWSQDGALQDTSCQVHAWPDRRRWNQTCELLPVSQASWACNLILGAPDSQKLTT |
| | VDIVTLRVLCREGVRWRVMAIQDFKPFENLRLMAPISLQVVHVETHRCNISWEISQASHYFERHLEFEARTLSPGHT |
| | WEEAPLLTLKQKQEWICLETLTPDTQYEFQVRVKPLQGEFTTWSPWSQPLAFRTKPAALGKDGHHHHHHHH |
| [symbol] A522 | TIKPCPPCKCPAPNAAGGPSVFIFPPKIKDVLMISLSPIVTCVVVDVSEDDPDVQISWFVNNVEVHTAQTQTHREDYN |
| | STLRVVSALPIQHQDWMSGKEFKCKVNNKDLGAPIERTISKPKGSVRAPQVCVLPPPEEEMTKKQVTLSCAVTDFMP |
| | EDIYVEWTNNGKTELNYKNTEPVLDSDGSYFMVSKLRVEKKNWVERNSYSCSVVHEGLHNHHTTKSFSRTPGPGSG |
| | SAVKNCSHLECFYNSRANVSCMWSHEEALNVTTCHVHAKSNLRHWNKTCELTLVRQASWACNLILGSFPESQSLTS |
| | VDLLDINVVCWEEKGWRRVKTCDFHPFDNLRLVAPHSLQVLHIDTQRCNISWKVSQVSHYIEPYLEFEARRRLLGHS |
| | WEDASVLSLKQRQQWLFLEMLIPSTSYEVQVRVKAQRNNTGTWSPWSQPLTFRTRPADPMKEGHHHHHHHH |
| [symbol] A528 | DKTHTCPPCPAPELLGGPSVFLFPPKPKDTLMISRTPEVTCVVVDVSHEDPEVKFNWYVDGVEVHNAKTKPREEQYA |
| | STYRVVSVLTVLHQDWLNGKEYKCKVSNKALPAPIEKTISKAKGQPREPQVCTLPPSRDELTKNQVSLSCAVKGFYPSD |
| | IAVEWESNGQPENNYKTTPPVLDSDGSFFLVSKLTVDKSRWQQGNVFSCSVMHEALHNHYTQKSLSLSPGPGSGSA |
| | VNGTSQFTCFYNSRANISCVWSQDGALQDTSCQVHAWPDRRRWNQTCELLPVSQASWACNLILGAPDSQKLTTV |
| | DIVTLRVLCREGVRWRVMAIQDFKPFENLRLMAPISLQVVHVETHRCNISWEISQASHYFERHLEFEARTLSPGHTW |
| | EEAPLLTLKQKQEWISLETLTPDTQYEFQVRVKPLQGEFTTWSPWSQPLAFRTKPAALGKD |
| | VRSGCKPCICTVPEVSSVFIFPPKPKDVLTITLTPKVTCVVVAISKDDPEVQFSWFVDDVEVHTAQTQPREEQFNSTFR |
| [symbol] A530 | SVSELPIMHQDWLNGKEFKCRVNSAAFGAPIEKTISKTKGRPKAPQVYTIPPPKEQMAKDKVSLTCMITDFFPEDITVE |
| | WQWNGQPAENYDNTQPIMDTDGSYFVYSDLNVQKSNWEAGNTFTCSVLHEGLHNHHTEKSLSHSPGGGSSPPG |
| | GGSSGGGSGPAPTSSSTKKTQLQLEHLLLDLQMILNGINNYKNPKLTAMLTAKFAMPKKATELKHLQCLEEALKPLEE |
| | VLNLAQSKNFHLRPRDLISNINVIVLELKGSETTFMCEYADETATIVEFLNRWITFAQSIISTLT |
| [symbol] A531 | VRSGCKPCICTVPEVSSVFIFPPKPKDVLTITLTPKVTCVVVAISKDDPEVQFSWFVDDVEVHTAQTQPREEQFNSTFR |
| | SVSELPIMHQDWLNGKEFKCRVNSAAFGAPIEKTISKTKGRPKAPQVYTIPPPKEQMAKDKVSLTCMITDFFPEDITVE |
| | WQWNGQPAENYDNTQPIMDTDGSYFVYSDLNVQKSNWEAGNTFTCSVLHEGLHNHHTEKSLSHSPGGSPGVPLS |
| | LYSGPAPTSSSTKKTQLQLEHLLLDLQMILNGINNYKNPKLTAMLTAKFAMPKKATELKHLQCLEEALKPLEEVLNLAQ |
| | SKNFHLRPRDLISNINVIVLELKGSETTFMCEYADETATIVEFLNRWITFAQSIISTLT |
| [symbol] A532 | VRSGCKPCICTVPEVSSVFIFPPKPKDVLTITLTPKVTCVVVAISKDDPEVQFSWFVDDVEVHTAQTQPREEQFNSTFR |
| | SVSELPIMHQDWLNGKEFKCRVNSAAFGAPIEKTISKTKGRPKAPQVYTIPPPKKQMAKDKVSLTCMITDFFPEDITV |
| | EWQWNGQPAENYKNTQPIMKTDGSYFVYSKLNVQKSNWEAGNTFTCSVLHEGLHNHHTEKSLSHSPG |
| [symbol] A533 | VRSGCKPCICTVPEVSSVFIFPPKPKDVLTITLTPKVTCVVVAISKDDPEVQFSWFVDDVEVHTAQTQPREEQFNSTFR |
| | SVSELPIMHQDWLNGKEFKCRVNSAAFGAPIEKTISKTKGRPKAPQVYTIPPPKKQMAKDKVSLTCMITDFFPEDITV |
| | EWQWNGQPAENYKNTQPIMKTDGSYFVYSKLNVQKSNWEAGNTFTCSVLHEGLHNHHTEKSLSHSPGPGSGSAV |
| | NGTSQFTCFYNSRANISCVWSQDGALQDTSCQVHAWPDRRRWNQTCELLPVSQASWACNLILGAPDSQKLTTVDI |
| | VTLRVLCREGVRWRVMAIQDFKPFENLRLMAPISLQVVHVETHRCNISWEISQASHYFERHLEFEARTLSPGHTWEE |
| | APLLTLKQKQEWICLETLTPDTQYEFQVRVKPLQGEFTTWSPWSQPLAFRTKPAALGKD |
| [symbol] A534 | VRSGCKPCICTVPEVSSVFIFPPKPKDVLTITLTPKVTCVVVAISKDDPEVQFSWFVDDVEVHTAQTQPREEQFNSTFR |
| | SVSELPIMHQDWLNGKEFKCRVNSAAFGAPIEKTISKTKGRPKAPQVYTIPPPKKQMAKDKVSLTCMITDFFPEDITV |
| | EWQWNGQPAENYKNTQPIMKTDGSYFVYSKLNVQKSNWEAGNTFTCSVLHEGLHNHHTEKSLSHSPGPGSGSAV |
| | KNCSHLECFYNSRANVSCMWSHEEALNVTTCHVHAKSNLRHWNKTCELTLVRQASWACNLILGSFPESQSLTSVDLL |
| | DINVVCWEEKGWRRVKTCDFHPFDNLRLVAPHSLQVLHIDTQRCNISWKVSQVSHYIEPYLEFEARRRLLGHSWEDA |
| | SVLSLKQRQQWLFLEMLIPSTSYEVQVRVKAQRNNTGTWSPWSQPLTFRTRPADPMKE |
| | DKTHTCPPCPAPELLGGPSVFLFPPKPKDTLMISRTPEVTCVVVDVSHEDPEVKFNWYVDGVEVHNAKTKPREEQYA |
| | STYRVVSVLTVLHQDWLNGKEYKCKVSNKALPAPIEKTISKAKGQPREPQVYTLPPCRDELTKNQVSLWCLVKGFYPS |
| [symbol] A542 | DIAVEWESNGQPENNYKTTPPVLDSDGSFFLYSKLTVDKSRWQQGNVFSCSVMHEALHNHYTQKSLSLSPGGISSGL |
| | LSGRSDQPSGPAPTSSSTKKTQLQLEHLLLDLQMILNGINNYKNPKLTAMLTAKFAMPKKATELKHLQCLEEALKPLEE |
| | VLNLAQSKNFHLRPRDLISNINVIVLELKGSETTFMCEYADETATIVEFLNRWITFAQSIISTLT |
| | DKTHTCPPCPAPELLGGPSVFLFPPKPKDTLMISRTPEVTCVVVDVSHEDPEVKFNWYVDGVEVHNAKTKPREEQYA |
| | STYRVVSVLTVLHQDWLNGKEYKCKVSNKALPAPIEKTISKAKGQPREPQVCTLPPSRDELTKNQVSLSCAVKGFYPSD |
| | IAVEWESNGQPENNYKTTPPVLDSDGSFFLVSKLTVDKSRWQQGNVFSCSVMHEALHNHYTQKSLSLSPGGPPSGS |
| [symbol] A543 | SPGVPLSLYGSGGGAVNGTSQFTCFYNSRANISCVWSQDGALQDTSCQVHAWPDRRRWNQTCELLPVSQASWAC |
| | NLILGAPDSQKLTTVDIVTLRVLCREGVRWRVMAIQDFKPFENLRLMAPISLQVVHVETHRCNISWEISQASHYFERH |
| | LEFEARTLSPGHTWEEAPLLTLKQKQEWICLETLTPDTQYEFQVRVKPLQGEFTTWSPWSQPLAFRTKPAALGKD |
| [symbol] A544 | DKTHTCPPCPAPELLGGPSVFLFPPKPKDTLMISRTPEVTCVVVDVSHEDPEVKFNWYVDGVEVHNAKTKPREEQYA |
| | STYRVVSVLTVLHQDWLNGKEYKCKVSNKALPAPIEKTISKAKGQPREPQVYTLPPCRDELTKNQVSLWCLVKGFYPS |
| | DIAVEWESNGQPENNYKTTPPVLDSDGSFFLYSKLTVDKSRWQQGNVFSCSVMHEALHNHYTQKSLSLSPGGSPGV |
| | PLSLYSGPAPTSSSTKKTQLQLEHLLLDLQMILNGINNYKNPKLTAMLTAKFAMPKKATELKHLQCLEEALKPLEEVLNL |
| | SKNFHFDPRDVVSNINVFVLELKGSETTFMCEYADETATIVEFLNRWITFAQSIISTLT |
| [symbol] A545 | DKTHTCPPCPAPELLGGPSVFLFPPKPKDTLMISRTPEVTCVVVDVSHEDPEVKFNWYVDGVEVHNAKTKPREEQYA |
| | STYRVVSVLTVLHQDWLNGKEYKCKVSNKALPAPIEKTISKAKGQPREPQVYTLPPCRDELTKNQVSLWCLVKGFYPS |
| | DIAVEWESNGQPENNYKTTPPVLDSDGSFFLYSKLTVDKSRWQQGNVFSCSVMHEALHNHYTQKSLSLSPGGISSGL |
| | LSGRSSGPAPTSSSTKKTQLQLEHLLLDLQMILNGINNYKNPKLTAMLTAKFAMPKKATELKHLQCLEEALKPLEEVLN |
| | LAQSKNFHLRPRDLISNINVIVLELKGSETTFMCEYADETATIVEFLNRWITFAQSIISTLT |
| [symbol] A546 | DKTHTCPPCPAPELLGGPSVFLFPPKPKDTLMISRTPEVTCVVVDVSHEDPEVKFNWYVDGVEVHNAKTKPREEQYA |
| | STYRVVSVLTVLHQDWLNGKEYKCKVSNKALPAPIEKTISKAKGQPREPQVYTLPPCRDELTKNQVSLWCLVKGFYPS |
| | DIAVEWESNGQPENNYKTTPPVLDSDGSFFLYSKLTVDKSRWQQGNVFSCSVMHEALHNHYTQKSLSLSPGGGSSP |
| | PGGGSSGGGSGPAPTSSSTKKTQLQLEHLLLDLQMILNGINNYKNPKLTAMLTAKFAMPKKATELKHLQCLEEALKPL |
| | EEVLNLAQSKNFHFDPRDVVSNINVFVLELKGSETTFMCEYADETATIVEFLNRWITFAQSIISTLT |
| [symbol] A547 | EPKSSDKTHTCPPCPAPELLGGPSVFLFPPKPKDTLMISRTPEVTCVVVDVSHEDPEVKFNWYVDGVEVHNAKTKPRE |
| | EQYASTYRVVSVLTVLHQDWLNGKEYKCKVSNKALPAPIEKTISKAKGQPREPQVCTLPPSRDELTKNQVSLSCAVKG |
| | FYPSDIAVEWESNGQPENNYKTTPPVLDSDGSFFLVSKLTVDKSRWQQGNVFSCSVMHEALHNHYTQKSLSLSPGP |
| | GSGSAVNGTSQFTCFYNSRANISCVWSQDGALQDTSCQVHAWPDRRRWNQTCELLPVSQASWACNLILGAPDSQ |
| | KLTTVDIVTLRVLCREGVRWRVMAIQDFKPFENLRLMAPISLQVVHVETHRCNISWEISQASHYFERHLEFEARTLSP |
| | GHTWEEAPLLTLKQKQEWICLETLTPDTQYEFQVRVKPLQGEFTTWSPWSQPLAFRTKPAALGKD |
| [symbol] A548 | AKTDKTHTCPPCPAPELLGGPSVFLFPPKPKDTLMISRTPEVTCVVVDVSHEDPEVKFNWYVDGVEVHNAKTKPREE |
| | QYASTYRVVSVLTVLHQDWLNGKEYKCKVSNKALPAPIEKTISKAKGQPREPQVCTLPPSRDELTKNQVSLSCAVKGF |
| | YPSDIAVEWESNGQPENNYKTTPPVLDSDGSFFLVSKLTVDKSRWQQGNVFSCSVMHEALHNHYTQKSLSLSPGPG |
| | SGSAVNGTSQFTCFYNSRANISCVWSQDGALQDTSCQVHAWPDRRRWNQTCELLPVSQASWACNLILGAPDSQK |
| | LTTVDIVTLRVLCREGVRWRVMAIQDFKPFENLRLMAPISLQVVHVETHRCNISWEISQASHYFERHLEFEARTLSPG |
| | HTWEEAPLLTLKQKQEWICLETLTPDTQYEFQVRVKPLQGEFTTWSPWSQPLAFRTKPAALGKD |
| [symbol] A549 | AKTEPKSSDKTHTCPPCPAPELLGGPSVFLFPPKPKDTLMISRTPEVTCVVVDVSHEDPEVKFNWYVDGVEVHNAKTK |
| | PREEQYASTYRVVSVLTVLHQDWLNGKEYKCKVSNKALPAPIEKTISKAKGQPREPQVCTLPPSRDELTKNQVSLSCA |
| | VKGFYPSDIAVEWESNGQPENNYKTTPPVLDSDGSFFLVSKLTVDKSRWQQGNVFSCSVMHEALHNHYTQKSLSLS |
| | PGPGSGSAVNGTSQFTCFYNSRANISCVWSQDGALQDTSCQVHAWPDRRRWNQTCELLPVSQASWACNLILGAP |
| | DSQKLTTVDIVTLRVLCREGVRWRVMAIQDFKPFENLRLMAPISLQVVHVETHRCNISWEISQASHYFERHLEFEART |
| | LSPGHTWEEAPLLTLKQKQEWICLETLTPDTQYEFQVRVKPLQGEFTTWSPWSQPLAFRTKPAALGKD |
| [symbol] A550 | EPKSSDKTHTCPPCPAPELLGGPSVFLFPPKPKDTLMISRTPEVTDVVVDVSHEDPEVKFNWYVDGVEVHNAKTKPRE |
| | EQYASTYRVVSVLTVLHQDWLNGKEYKCKVSNKALPAPIEKTISKAKGQPREPQVYTLPPCRDELTKNQVSLWCLVKG |
| | FYPSDIAVEWESNGQPENNYKTTPPVLDSDGSFFLYSKLTVDKSRWQQGNVFSCSVMHEALHNHYTQKSLSLSPGG |
| | SPGVPLSLYSGPAPTSSSTKKTQLQLEHLLLDLQMILNGINNYKNPKLTAMLTAKFAMPKKATELKHLQCLEEALKPLE |
| | EVLNLAQSKNFHLRPRDLISNINVIVLELKGSETTFMCEYADETATIVEFLNRWITFAQSIISTLT |
| [symbol] A551 | AKTDKTHTCPPCPAPELLGGPSVFLFPPKPKDTLMISRTPEVTCVVVDVSHEDPEVKFNWYVDGVEVHNAKTKPREE |
| | QYASTYRVVSVLTVLHQDWLNGKEYKCKVSNKALPAPIEKTISKAKGQPREPQVYTLPPCRDELTKNQVSLWCLVKGF |
| | YPSDIAVEWESNGQPENNYKTTPPVLDSDGSFFLYSKLTVDKSRWQQGNVFSCSVMHEALHNHYTQKSLSLSPGGS |
| | PGVPLSLYSGPAPTSSSTKKTQLQLEHLLLDLQMILNGINNYKNPKLTAMLTAKFAMPKKATELKHLQCLEEALKPLEE |
| | VLNLAQSKNFHLRPRDLISNINVIVLELKGSETTFMCEYADETATIVEFLNRWITFAQSIISTLT |
| [symbol] A552 | AKTEPKSSDKTHTCPPCPAPELLGGPSVFLFPPKPKDTLMISRTPEVTCVVVDVSHEDPEVKFNWYVDGVEVHNAKTK |
| | PREEQYASTYRVVSVLTVLHQDWLNGKEYKCKVSNKALPAPIEKTISKAKGQPREPQVYTLPPCRDELTKNQVSLWCL |
| | VKGFYPSDIAVEWESNGQPENNYKTTPPVLDSDGSFFLYSKLTVDKSRWQQGNVFSCSVMHEALHNHYTQKSLSLS |
| | PGGSPGVPLSLYSGPAPTSSSTKKTQLQLEHLLLDLQMILNGINNYKNPKLTAMLTAKFAMPKKATELKHLQCLEEALK |
| | PLEEVLNLAQSKNFHLRPRDLISNINVIVLELKGSETTFMCEYADETATIVEFLNRWITFAQSIISTLT |
| [symbol] A553 | DKTHTCPPCPAPELLGGPSVFLFPPKPKDTLMISRTPEVTCVVVDVSHEDPEVKFNWYVDGVEVHNAKTKPREEQYA |
| | STYRVVSVLTVLHQDWLNGKEYKCKVSNKALPAPIEKTISKAKGQPREPQVCTLPPSRDELTKNQVSLSCAVKGFYPSD |
| | IAVEWESNGQPENNYKTTPPVLDSDGSFFLVSKLTVDSKRWQQGNVFSCSVMHEALHNHYTQKSLSLSPGGPPSGS |
| | SPGDSGGFMLTSGGGAVNGTSQFTCFYNSRANISCVWSQDGALQDTSCQVHAWPDRRRWNQTCELLPVSQASW |
| | ACNLILGAPDSQKLTTVDIVTLRVLCREGVRWRVMAIQDFKPFENLRLMAPISLQVVHVETHRCNISWEISQASHYFE |
| | RHLEFEARTLSPGHTWEEAPLLTLKQKQEWICLETLTPDTQYEFQVRVKPLQGEFTTWSPWSQPLAFRTKPAALGKD |
| [symbol] A554 | DKTHTCPPCPAPELLGGPSVFLFPPKPKDTLMISRTPEVTCVVVDVSHEDPEVKFNWYVDGVEVHNAKTKPREEQYA |
| | STYRVVSVLTVLHQDWLNGKEYKCKVSNKALPAPIEKTISKAKGQPREPQVYTLPPCRDELTKNQVSLWCLVKGFYPS |
| | DIAVEWESNGQPENNYKTTPPVLDSDGSFFLYSKLTVDKSRWQQGNVFSCSVMHEALHNHYTQKSLSLSPGGSPGV |
| | PLSLYSGPAPTSSSTKKTQLQLRHLCLRLQMILNGINNYKNPKLTAMLTAKFAMPKKATELKHLQCLEEALKPLEEVLN |
| | LAQSKNFHLRPRDLISNINVIVLELKGSETTFMCEYADETATIVEFLNRWITFCQSIISTLT |
| [symbol] A563 | DKTHTCPPCPAPELLGGPSVFLFPPKPKDTLMISRTPEVTCVVVDVSHEDPEVKFNWYVDGVEVHNAKTKPREEQYA |
| | STYRVVSVLTVLHQDWLNGKEYKCKVSNKALPAPIEKTISKAKGQPREPQVYTLPPCRDELTKNQVSLWCLVKGFYPS |
| | DIAVEWESNGQPENNYKTTPPVLDSDGSFFLYSKLTVDKSRWQQGNVFSCSVMHEALHNHYTQKSLSLSPGGSPGV |
| | PLSLYSGPAPTSSSTKKTQLQLRHLCLRLQMILNGINNYKNPKLTAMLTAKFAMPKKATELKHLQCLEEALKPLEEVLN |
| | LAQSKNFHLRPRDLISLINVIVLELKGSETTFMCEYADETATIVEFLNRWITFCQSIISTLT |
| [symbol] A565 | DKTHTCPPCPAPELLGGPSVFLFPPKPKDTLMISRTPEVTCVVVDVSHEDPEVKFNWYVDGVEVHNAKTKPREEQYA |
| | STYRVVSVLTVLHQDWLNGKEYKCKVSNKALPAPIEKTISKAKGQPREPQVYTLPPCRDELTKNQVSLWCLVKGFYPS |
| | DIAVEWESNGQPENNYKTTPPVLDSDGSFFLYSKLTVDKSRWQQGNVFSCSVMHEALHNHYTQKSLSLSPGGSPGV |
| | PLSLYSGPAPTSSSTKKTQLQLLHLCLRLQMILNGINNYKNPKLTAMLTAKFAMPKKATELKHLQCLEEALKPLEEVLNL |
| | AQSKNFHLRPRDLISLINVIVLELKGSETTFMCEYADETATIVEFLNRWITFCQSIISTLT |
| [symbol] A566 | DKTHTCPPCPAPELLGGPSVFLFPPKPKDTLMISRTPEVTCVVVDVSHEDPEVKFNWYVDGVEVHNAKTKPREEQYA |
| | STYRVVSVLTVLHQDWLNGKEYKCKVSNKALPAPIEKTISKAKGQPREPQVYTLPPCRDELTKNQVSLWCLVKGFYPS |
| | DIAVEWESNGQPENNYKTTPPVLDSDGSFFLYSKLTVDKSRWQQGNVFSCSVMHEALHNHYTQKSLSLSPGGSPGV |
| | PLSLYSGPAPTSSSTKKTQLQLRHLCLDLQMILNGINNYKNPKLTAMLTAKFAMPKKATELKHLQCLEEALKPLEEVLN |
| | LAQSKNFHLRPRDLISLINVIVLELKGSETTFMCEYADETATIVEFLNRWITFCQSIISTLT |
| [symbol] A567 | DKTHTCPPCPAPELLGGPSVFLFPPKPKDTLMISRTPEVTCVVVDVSHEDPEVKFNWYVDGVEVHNAKTKPREEQYA |
| | STYRVVSVLTVLHQDWLNGKEYKCKVSNKALPAPIEKTISKAKGQPREPQVYTLPPCRDELTKNQVSLWCLVKGFYPS |
| | DIAVEWESNGQPENNYKTTPPVLDSDGSFFLYSKLTVDKSRWQQGNVFSCSVMHEALHNHYTQKSLSLSPGGSPGV |
| | PLSLYSGPAPTSSSTKKTQLQLEHLCLRLQMILNGINNYKNPKLTAMLTAKFAMPKKATELKHLQCLEEALKPLEEVLNL |
| | AQSKNFHLRPRDLISLINVIVLELKGSETTFMCEYADETATIVEFLNRWITFCQSIISTLT |
| [symbol] A568 | DKTHTCPPCPAPELLGGPSVFLFPPKPKDTLMISRTPEVTCVVVDVSHEDPEVKFNWYVDGVEVHNAKTKPREEQYA |
| | STYRVVSVLTVLHQDWLNGKEYKCKVSNKALPAPIEKTISKAKGQPREPQVYTLPPCRDELTKNQVSLWCLVKGFYPS |
| | DIAVEWESNGQPENNYKTTPPVLDSDGSFFLYSKLTVDKSRWQQGNVFSCSVMHEALHNHYTQKSLSLSPGGSPGV |
| | PLSLYSGPAPTSSSTKKTQLQLFHLCLRLQMILNGINNYKNPKLTAMLTAKFAMPKKATELKHLQCLEEALKPLEEVLNL |
| | AQSKNFHLRPRDLISLINVIVLELKGSETTFMCEYADETATIVEFLNRWITFCQSIISTLT |
| [symbol] A575 | DKTHTCPPCPAPELLGGPSVFLFPPKPKDTLMASRTPEVTCVVVDVSHEDPEVKFNWYVDGVEVHNAKTKPREEQY |
| | ASTYRVVSVLTVLHQDWLNGKEYKCKVSNKALPAPIEKTISKAKGQPREPQVCTLPPSRDELTKNQVSLSCAVKGFYPS |
| | DIAVEWESNGQPENNYKTTPPVLDSDGSFFLVSKLTVDKSRWQQGNVFSCSVMHEALHNHYTQKSLSLSPGPGSGS |
| | AVNGTSQFTCFYNSRANISCVWSQDGALQDTSCQVHAWPDRRRWNQTCELLPVSQASWACNLILGAPDSQKLTT |
| | VDIVTLRVLCREGVRWRVMAIQDFKPFENLRLMAPISLQVVHVETHRCNISWEISQASHYFERHLEFEARTLSPGHT |
| | WEEAPLLTLKQKQEWICLETLTPDTQYEFQVRVKPLQGEFTTWSPWSQPLAFRTKPAALGKD |
| [symbol] A576 | DKTHTCPPCPAPELLGGPSVFLFPPKPKDTLYITREPEVTCVVVDVSHEDPEVKFNWYVDGVEVHNAKTKPREEQYAS |
| | TYRVVSVLTVLHQDWLNGKEYKCKVSNKALPAPIEKTISKAKGQPREPQVCTLPPSRDELTKNQVSLSCAVKGFYPSDI |
| | AVEWESNGQPENNYKTTPPVLDSDGSFFLVSKLTVDKSRWQQGNVFSCSVMHEALHNHYTQKSLSLSPGPGSGSA |
| | VNGTSQFTCFYNSRANISCVWSQDGALQDTSCQVHAWPDRRRWNQTCELLPVSQASWACNLILGAPDSQKLTTV |
| | DIVTLRVLCREGVRWRVMAIQDFKPFENLRLMAPISLQVVHVETHRCNISWEISQASHYFERHLEFEARTLSPGHTW |
| | EEAPLLTLKQKQEWICLETLTPDTQYEFQVRVKPLQGEFTTWSPWSQPLAFRTKPAALGKD |
| [symbol] A577 | DKTHTCPPCPAPELLGGPSVFLFPPKPKDTLMASRTPEVTCVVVDVSHEDPEVKFNWYVDGVEVHNAKTKPREEQY |
| | ASTYRVVSVLTVLHQDWLNGKEYKCKVSNKALPAPIEKTISKAKGQPREPQVYTLPPCRDELTKNQVSLWCLVKGFYP |
| | SDIAVEWESNGQPENNYKTTPPVLDSDGSFFLYSKLTVDKSRWQQGNVFSCSVMHEALHNHYTQKSLSLSPGGGSS |
| | PPGGGSSGGGSGPAPTSSSTKKTQLQLEHLLLDLQMILNGINNYKNPKLTAMLTAKFAMPKKATELKHLQCLEEALKP |
| | LEEVLNLAQSKNFHLRPRDLISNINVIVLELKGSETTFMCEYADETATIVEFLNRWITFAQSIISTLT |
| [symbol] A578 | DKTHTCPPCPAPELLGGPSVFLFPPKPKDTLYITREPEVTCVVVDVSHEDPEVKFNWYVDGVEVHNAKTKPREEQYAS |
| | TYRVVSVLTVLHQDWLNGKEYKCKVSNKALPAPIEKTISKAKGQPREPQVYTLPPCRDELTKNQVSLWCLVKGFYPSD |
| | IAVEWESNGQPENNYKTTPPVLDSDGSFFLYSKLTVDKSRWQQGNVFSCSVMHEALHNHYTQKSLSLSPGGGSSPP |
| | GGGSSGGGSGPAPTSSSTKKTQLQLEHLLLDLQMILNGINNYKNPKLTAMLTAKFAMPKKATELKHLQCLEEALKPLE |
| | EVLNLAQSKNFHLRPRDLISNINVIVLELKGSETTFMCEYADETATIVEFLNRWITFAQSIISTLT |
| [symbol] A579 | DKTHTCPPCPAPELLGGPSVFLFPPKPKDTLMASRTPEVTCVVVDVSHEDPEVKFNWYVDGVEVHNAKTKPREEQY |
| | ASTYRVVSVLTVLHQDWLNGKEYKCKVSNKALPAPIEKTISKAKGQPREPQVYTLPPCRDELTKNQVSLWCLVKGFYP |
| | SDIAVEWESNGQPENNYKTTPPVLDSDGSFFLYSKLTVDKSRWQQGNVFSCSVMHEALHNHYTQKSLSLSPGGSPG |
| | VPLSLYSGPAPTSSSTKKTQLQLEHLLLDLQMILNGINNYKNPKLTAMLTAKFAMPKKATELKHLQCLEEALKPLEEVL |
| | NLAQSKNFHLRPRDLISNINVIVLELKGSETTFMCEYADETATIVEFLNRWITFAQSIISTLT |
| [symbol] A580 | DKTHTCPPCPAPELLGGPSVFLFPPKPKDTLYITREPEVTCVVVDVSHEDPEVKFNWYVDGVEVHNAKTKPREEQYAS |
| | TYRVVSVLTVLHQDWLNGKEYKCKVSNKALPAPIEKTISKAKGQPREPQVYTLPPCRDELTKNQVSLWCLVKGFYPSD |
| | IAVEWESNGQPENNYKTTPPVLDSDGSFFLYSKLTVDKSRWQQGNVFSCSVMHEALHNHYTQKSLSLSPGGSPGVP |
| | LSLYSGPAPTSSSTKKTQLQLEHLLLDLQMILNGINNYKNPKLTAMLTAKFAMPKKATELKHLQCLEEALKPLEEVLNLA |
| | QSKNFHLRPRDLISNINVIVLELKGSETTFMCEYADETATIVEFLNRWITFAQSIISTLT |
| [symbol] A581 | DKTHTCPPCPAPELLGGPSVFLFPPKPKDTLMISRTPEVTCVVVDVSHEDPEVKFNWYVDGVEVHNAKTKPREEQYA |
| | STYRVVSVLTVLHQDWLNGKEYKCKVSNKALPAPIEKTISKAKGQPREPQVYTLPPCRDELTKNQVSLWCLVKGFYPS |
| | DIAVEWESNGQPENNYKTTPPVLDSDGSFFLYSKLTVDKSRWQQGNVFSCSVMHEALHNHYTQKSLSLSPGGSPGV |
| | PLSLYSGPAPTSSSTKKTQLQLEHLCLDLQMILNGINNYKNPKLTAMLTAKFAMPKKATELKHLQCLEEALKPLEEVLN |
| | LAQSKNFHLRPRDLISNINVIVLELKGSETTFMCEYADETATIVEFLNRWITFCQSIISTLT |
| [symbol] A582 | DKTHTCPPCPAPELLGGPSVFLFPPKPKDTLMISRTPEVTCVVVDVSHEDPEVKFNWYVDGVEVHNAKTKPREEQYA |
| | STYRVVSVLTVLHQDWLNGKEYKCKVSNKALPAPIEKTISKAKGQPREPQVYTLPPCRDELTKNQVSLWCLVKGFYPS |
| | DIAVEWESNGQPENNYKTTPPVLDSDGSFFLYSKLTVDKSRWQQGNVFSCSVMHEALHNHYTQKSLSLSPGGSPGV |
| | PLSLYSGPAPTSSSTKKTQLQLEYLLLDLQMILNGINNYKNPKLTAMLTAKFAMPKKATELKHLQCLEEALKPLEEVLNL |
| | AQSKNFHLRPRDLISNINVIVLELKGSETTFMCEYADETATIVEFLNRWITFAQSIISTLT |
| [symbol] A583 | DKTHTCPPCPAPELLGGPSVFLFPPKPKDTLMISRTPEVTCVVVDVSHEDPEVKFNWYVDGVEVHNAKTKPREEQYA |
| | STYRVVSVLTVLHQDWLNGKEYKCKVSNKALPAPIEKTISKAKGQPREPQVYTLPPCRDELTKNQVSLWCLVKGFYPS |
| | DIAVEWESNGQPENNYKTTPPVLDSDGSFFLYSKLTVDKSRWQQGNVFSCSVMHEALHNHYTQKSLSLSPGGSPGV |
| | PLSLYSGPAPTSSSTKKTQLQLEELLLDLQMILNGINNYKNPKLTAMLTAKFAMPKKATELKHLQCLEEALKPLEEVLNL |
| | AQSKNFHLRPRDLISNINVIVLELKGSETTFMCEYADETATIVEFLNRWITFAQSIISTLT |
| [symbol] A584 | DKTHTCPPCPAPELLGGPSVFLFPPKPKDTLMISRTPEVTCVVVDVSHEDPEVKFNWYVDGVEVHNAKTKPREEQYA |
| | STYRVVSVLTVLHQDWLNGKEYKCKVSNKALPAPIEKTISKAKGQPREPQVYTLPPCRDELTKNQVSLWCLVKGFYPS |
| | DIAVEWESNGQPENNYKTTPPVLDSDGSFFLYSKLTVDKSRWQQGNVFSCSVMHEALHNHYTQKSLSLSPGGSPGV |
| | PLSLYSGPAPTSSSTKKTQLQLEHLLLLLQMILNGINNYKNPKLTAMLTAKFAMPKKATELKHLQCLEEALKPLEEVLNL |
| | AQSKNFHLRPRDLISNINVIVLELKGSETTFMCEYADETATIVEFLNRWITFAQSIISTLT |
| [symbol] A585 | DKTHTCPPCPAPELLGGPSVFLFPPKPKDTLMISRTPEVTCVVVDVSHEDPEVKFNWYVDGVEVHNAKTKPREEQYA |
| | STYRVVSVLTVLHQDWLNGKEYKCKVSNKALPAPIEKTISKAKGQPREPQVYTLPPCRDELTKNQVSLWCLVKGFYPS |
| | DIAVEWESNGQPENNYKTTPPVLDSDGSFFLYSKLTVDKSRWQQGNVFSCSVMHEALHNHYTQKSLSLSPGGSPGV |
| | PLSLYSGPAPTSSSTKKTQLQLEYLCLDLQMILNGINNYKNPKLTAMLTAKFAMPKKATELKHLQCLEEALKPLEEVLNL |
| | AQSKNFHLRPRDLISNINVIVLELKGSETTFMCEYADETATIVEFLNRWITFCQSIISTLT |
| [symbol] A586 | DKTHTCPPCPAPELLGGPSVFLFPPKPKDTLMISRTPEVTCVVVDVSHEDPEVKFNWYVDGVEVHNAKTKPREEQYA |
| | STYRVVSVLTVLHQDWLNGKEYKCKVSNKALPAPIEKTISKAKGQPREPQVYTLPPCRDELTKNQVSLWCLVKGFYPS |
| | DIAVEWESNGQPENNYKTTPPVLDSDGSFFLYSKLTVDKSRWQQGNVFSCSVMHEALHNHYTQKSLSLSPGGSPGV |
| | PLSLYSGPAPTSSSTKKTQLQLEELCLDLQMILNGINNYKNPKLTAMLTAKFAMPKKATELKHLQCLEEALKPLEEVLNL |
| | AQSKNFHLRPRDLISNINVIVLELKGSETTFMCEYADETATIVEFLNRWITFCQSIISTLT |
| [symbol] A587 | DKTHTCPPCPAPELLGGPSVFLFPPKPKDTLMISRTPEVTCVVVDVSHEDPEVKFNWYVDGVEVHNAKTKPREEQYA |
| | STYRVVSVLTVLHQDWLNGKEYKCKVSNKALPAPIEKTISKAKGQPREPQVYTLPPCRDELTKNQVSLWCLVKGFYPS |
| | DIAVEWESNGQPENNYKTTPPVLDSDGSFFLYSKLTVDKSRWQQGNVFSCSVMHEALHNHYTQKSLSLSPGGSPGV |
| | PLSLYSGPAPTSSSTKKTQLQLEHLCLLLQMILNGINNYKNPKLTAMLTAKFAMPKKATELKHLQCLEEALKPLEEVLNL |
| | AQSKNFHLRPRDLISNINVIVLELKGSETTFMCEYADETATIVEFLNRWITFCQSIISTLT |
| [symbol] A588 | DKTHTCPPCPAPELLGGPSVFLFPPKPKDTLMISRTPEVTCVVVDVSHEDPEVKFNWYVDGVEVHNAKTKPREEQYA |
| | STYRVVSVLTVLHQDWLNGKEYKCKVSNKALPAPIEKTISKAKGQPREPQVYTLPPCRDELTKNQVSLWCLVKGFYPS |
| | DIAVEWESNGQPENNYKTTPPVLDSDGSFFLYSKLTVDKSRWQQGNVFSCSVMHEALHNHYTQKSLSLSPGGSPGV |
| | PLSLYSGPAPTSSSTKKTQLQLEYLCLLLQMILNGINNYKNPKLTAMLTAKFAMPKKATELKHLQCLEEALKPLEEVLNL |
| | AQSKNFHLRPRDLISNINVIVLELKGSETTFMCEYADETATIVEFLNRWITFCQSIISTLT |
| [symbol] A589 | DKTHTCPPCPAPELLGGPSVFLFPPKPKDTLMISRTPEVTCVVVDVSHEDPEVKFNWYVDGVEVHNAKTKPREEQYA |
| | STYRVVSVLTVLHQDWLNGKEYKCKVSNKALPAPIEKTISKAKGQPREPQVYTLPPCRDELTKNQVSLWCLVKGFYPS |
| | DIAVEWESNGQPENNYKTTPPVLDSDGSFFLYSKLTVDKSRWQQGNVFSCSVMHEALHNHYTQKSLSLSPGGSPGV |
| | PLSLYSGPAPTSSSTKKTQLQLEELCLLLQMILNGINNYKNPKLTAMLTAKFAMPKKATELKHLQCLEEALKPLEEVLNL |
| | AQSKNFHLRPRDLISNINVIVLELKGSETTFMCEYADETATIVEFLNRWITFCQSIISTLT |
| [symbol] A603 | ESKYGPPCPPCPAPEFLGGPSVFLFPPKPKDTLMISRTPEVTCVVVDVSQEDPEVQFNWYVDGVEVHNAKTKPREEQ |
| | FNSTYRVVSVLTVLHQDWLNGKEYKCKVSNKGLPSSIEKTISKAKGQPREPQVCTLPPSQEEMTKNQVSLSCAVKGFY |
| | PSDIAVEWESNGQPENNYKTTPPVLDSDGSFFLYSRLTVDKSRWQEGNVFSCSVMHEALHNHYTQKSLSLSLGPGS |
| | GSAVNGTSQFTCFYNSRANISCVWSQDGALQDTSCQVHAWPDRRRWNQTCELLPVSQASWACNLILGAPDSQKL |
| | TTVDIVTLRVLCREGVRWRVMAIQDFKPFENLRLMAPISLQVVHVETHRCNISWEISQASHYFERHLEFEARTLSPGH |
| | TWEEAPLLTLKQKQEWICLETLTPDTQYEFQVRVKPLQGEFTTWSPWSQPLAFRTKPAALGKD |
| [symbol] A604 | ESKYGPPCPPCPAPEFLGGPSVFLFPPKPKDTLMISRTPEVTCVVVDVSQEDPEVQFNWYVDGVEVHNAKTKPREEQ |
| | FNSTYRVVSVLTVLHQDWLNGKEYKCKVSNKGLPSSIEKTISKAKGQPREPQVYTLPPCQEEMTKNQVSLWCLVKGF |
| | YPSDIAVEWESNGQPENNYKTTPPVLDSDGSFFLYSRLTVDKSRWQEGNVFSCSVMHEALHNHYTQKSLSLSLGGGS |
| | SPPGGGSSGGGSGPAPTSSSTKKTQLQLEHLLLDLQMILNGINNYKNPKLTAMLTAKFAMPKKATELKHLQCLEEALK |
| | PLEEVLNLAQSKNFHLRPRDLISNINVIVLELKGSETTFMCEYADETATIVEFLNRWITFAQSIISTLT |
| [symbol] A605 | ESKYGPPCPPCPAPEFLGGPSVFLFPPKPKDTLMISRTPEVTCVVVDVSQEDPEVQFNWYVDGVEVHNAKTKPREEQ |
| | FNSTYRVVSVLTVLHQDWLNGKEYKCKVSNKGLPSSIEKTISKAKGQPREPQVYTLPPCQEEMTKNQVSLWCLVKGF |
| | YPSDIAVEWESNGQPENNYKTTPPVLDSDGSFFLYSRLTVDKSRWQEGNVFSCSVMHEALHNHYTQKSLSLSLGGSP |
| | GVPLSLYSGPAPTSSSTKKTQLQLEHLLLDLQMILNGINNYKNPKLTAMLTAKFAMPKKATELKHLQCLEEALKPLEEV |
| | LNLAQSKNFHLRPRDLISNINVIVLELKGSETTFMCEYADETATIVEFLNRWITFAQSIISTLT |
| [symbol] A606 | DKTHTCPPCPAPELLGGPSVFLFPPKPKDTLMISRTPEVTCVVVDVSHEDPEVKFNWYVDGVEVHNAKTKPREEQYA |
| | STYRVVSVLTVLHQDWLNGKEYKCKVSNKALPAPIEKTISKAKGQPREPQVCTLPPSRDELTKNQVSLSCAVKGFYPSD |
| | IAVEWESNGQPENNYKTTPPVLDSDGSFFLVSKLTVDKSRWQQGNVFSCSVMHEALHNHYTQKSLSLSPGGPPSGS |
| | SPRAAAVKSPSGGGAVNGTSQFTCFYNSRANISCVWSQDGALQDTSCQVHAWPDRRRWNQTCELLPVSQASWA |
| | CNLILGAPDSQKLTTVDIVTLRVLCREGVRWRVMAIQDFKPFENLRLMAPISLQVVHVETHRCNISWEISQASHYFER |
| | HLEFEARTLSPGHTWEEAPLLTLKQKQEWICLETLTPDTQYEFQVRVKPLQGEFTTWSPWSQPLAFRTKPAALGKD |
| [symbol] A608 | DKTHTCPPCPAPELLGGPSVFLFPPKPKDTLMASRTPEVTCVVVDVSHEDPEVKFNWYVDGVEVHNAKTKPREEQY |
| | ASTYRVVSVLTVLHQDWLNGKEYKCKVSNKALPAPIEKTISKAKGQPREPQVCTLPPSRDELTKNQVSLSCAVKGFYPS |
| | DIAVEWESNGQPENNYKTTPPVLDSDGSFFLVSKLTVDKSRWQQGNVFSCSVMHEALHNHYTQKSLSLSPGGPPSG |
| | SSPMPYDLYHPSGGGAVNGTSQFTCFYNSRANISCVWSQDGALQDTSCQVHAWPDRRRWNQTCELLPVSQASW |
| | ACNLILGAPDSQKLTTVDIVTLRVLCREGVRWRVMAIQDFKPFENLRLMAPISLQVVHVETHRCNISWEISQASHYFE |
| | RHLEFEARTLSPGHTWEEAPLLTLKQKQEWICLETLTPDTQYEFQVRVKPLQGEFTTWSPWSQPLAFRTKPAALGKD |
| [symbol] A609 | DKTHTCPPCPAPELLGGPSVFLFPPKPKDTLMASRTPEVTCVVVDVSHEDPEVKFNWYVDGVEVHNAKTKPREEQY |
| | ASTYRVVSVLTVLHQDWLNGKEYKCKVSNKALPAPIEKTISKAKGQPREPQVCTLPPSRDELTKNQVSLSCAVKGFYPS |
| | DIAVEWESNGQPENNYKTTPPVLDSDGSFFLVSKLTVDKSRWQQGNVFSCSVMHEALHNHYTQKSLSLSPGGPPSG |
| | SSPGVPLSLYGSGGGAVNGTSQFTCFYNSRANISCVWSQDGALQDTSCQVHAWPDRRRWNQTCELLPVSQASWA |
| | CNLILGAPDSQKLTTVDIVTLRVLCREGVRWRVMAIQDFKPFENLRLMAPISLQVVHVETHRCNISWEISQASHYFER |
| | HLEFEARTLSPGHTWEEAPLLTLKQKQEWICLETLTPDTQYEFQVRVKPLQGEFTTWSPWSQPLAFRTKPAALGKD |
| [symbol] A612 | DKTHTCPPCPAPELLGGPSVFLFPPKPKDTLMISRTPEVTCVVVDVSHEDPEVKFNWYVDGVEVHNAKTKPREEQYA |
| | STYRVVSVLTVLHQDWLNGKEYKCKVSNKALPAPIEKTISKAKGQPREPQVCTLPPSRDELTKNQVSLSCAVKGFYPSD |
| | IAVEWESNGQPENNYKTTPPVLDSDGSFFLVSKLTVDKSRWQQGNVFSCSVMHEALHNHYTQKSLSLSPGGPPSGS |
| | SPMPYDLYHPSGGGAVNGTSQFTCFYNSRANISCVWSQDGALQDTSCQVHAWPDRRRWNQTCELLPVSQASWA |
| | CNLILGAPDSQKLTTVDIVTLRVLCREGVRWRVMAIQDFKPFENLRLMAPISLQVVHVETHRSNISWEISQASHYFER |
| | HLEFEARTLSPGHTWEEAPLLTLKQKQEWISLETLTPDTQYEFQVRVKPLQGEFTTWSPWSQPLAFRTKPAALGKD |
| [symbol] A614 | DKTHTCPPCPAPELLGGPSVFLFPPKPKDTLMISRTPEVTCVVVDVSHEDPEVKFNWYVDGVEVHNAKTKPREEQYA |
| | STYRVVSVLTVLHQDWLNGKEYKCKVSNKALPAPIEKTISKAKGQPREPQVCTLPPSRDELTKNQVSLSCAVKGFYPSD |
| | IAVEWESNGQPENNYKTTPPVLDSDGSFFLVSKLTVDKSRWQQGNVFSCSVMHEALHNHYTQKSLSLSPGGPPSGS |
| | SPGDSGGFMLTSGGGAVNGTSQFTCFYNSRANISCVWSQDGALQDTSCQVHAWPDRRRWNQTCELLPVSQASW |
| | ACNLILGAPDSQKLTTVDIVTLRVLCREGVRWRVMAIQDFKPFENLRLMAPISLQVVHVETHRSNISWEISQASHYFE |
| | RHLEFEARTLSPGHTWEEAPLLTLKQKQEWISLETLTPDTQYEFQVRVKPLQGEFTTWSPWSQPLAFRTKPAALGKD |
| [symbol] A621 | ESKYGPPCPPCPAPEFLGGPSVFLFPPKPKDTLMISRTPEVTCVVVDVSQEDPEVQFNWYVDGVEVHNAKTKPREEQ |
| | FNSTYRVVSVLTVLHQDWLNGKEYKCKVSNKGLPSSIEKTISKAKGQPREPQVCTLPPSQEEMTKNQVSLSCAVKGFY |
| | PSDIAVEWESNGQPENNYKTTPPVLDSDGSFFLYSRLTVDKSRWQEGNVFSCSVMHEALHNHYTQKSLSLSLGGPPS |
| | GSSPGVPLSLYGSGGGAVNGTSQFTCFYNSRANISCVWSQDGALQDTSCQVHAWPDRRRWNQTCELLPVSQASW |
| | ACNLILGAPDSQKLTTVDIVTLRVLCREGVRWRVMAIQDFKPFENLRLMAPISLQVVHVETHRCNISWEISQASHYFE |
| | RHLEFEARTLSPGHTWEEAPLLTLKQKQEWICLETLTPDTQYEFQVRVKPLQGEFTTWSPWSQPLAFRTKPAALGKD |
| [symbol] A623 | DKTHTCPPCPAPELLGGPSVFLFPPKPKDTLMASRTPEVTCVVVDVSHEDPEVKFNWYVDGVEVHNAKTKPREEQY |
| | ASTYRVVSVLTVLHQDWLNGKEYKCKVSNKALPAPIEKTISKAKGQPREPQVYTLPPCRDELTKNQVSLWCLVKGFYP |
| | SDIAVEWESNGQPENNYKTTPPVLDSDGSFFLYSKLTVDKSRWQQGNVFSCSVMHEALHNHYTQKSLSLSPGGGSS |
| | PPMPYDLYHPSGPAPTSSSTKKTQLQLEHLLLDLQMILNGINNYKNPKLTAMLTAKFAMPKKATELKHLQCLEEALKP |
| | LEEVLNLAQSKNFHLRPRDLISNINVIVLELKGSETTFMCEYADETATIVEFLNRWITFAQSIISTLT |
| [symbol] A625 | DKTHTCPPCPAPELLGGPSVFLFPPKPKDTLMASRTPEVTCVVVDVSHEDPEVKFNWYVDGVEVHNAKTKPREEQY |
| | ASTYRVVSVLTVLHQDWLNGKEYKCKVSNKALPAPIEKTISKAKGQPREPQVCTLPPSRDELTKNQVSLSCAVKGFYPS |
| | DIAVEWESNGQPENNYKTTPPVLDSDGSFFLVSKLTVDKSRWQQGNVFSCSVMHEALHNHYTQKSLSLSPG |
| [symbol] A626 | ESKYGPPCPPCPAPEFLGGPSVFLFPPKPKDTLMISRTPEVTCVVVDVSQEDPEVQFNWYVDGVEVHNAKTKPREEQ |
| | FNSTYRVVSVLTVLHQDWLNGKEYKCKVSNKGLPSSIEKTISKAKGQPREPQVCTLPPSQEEMTKNQVSLSCAVKGFY |
| | PSDIAVEWESNGQPENNYKTTPPVLDSDGSFFLYSRLTVDKSRWQEGNVFSCSVMHEALHNHYTQKSLSLSLGPG |
| [symbol] A669 | DKTHTCPPCPAPELLGGPSVFLFPPKPKDTLMISRTPEVTCVVVDVSHEDPEVKFNWYVDGVEVHNAKTKPREEQYN |
| | STYRVVSVLTVLHQDWLNGKEYKCKVSNKALPAPIEKTISKAKGQPREPQVCTLPPSRDELTKNQVSLSCAVKGFYPSD |
| | IAVEWESNGQPENNYKTTPPVLDSDGSFFLVSKLTVDKSRWQQGNVFSCSVMHEALHNHYTQKSLSLSPGPGSGSA |
| | VNGTSQFTCFYNSRANISCVWSQDGALQDTSCQVHAWPDRRRWNQTCELLPVSQASWACNLILGAPDSQKLTTV |
| | DIVTLRVLCREGVRWRVMAIQDFKPFENLRLMAPISLQVVHVETHRCNISWEISQASHYFERHLEFEARTLSPGHTW |
| | EEAPLLTLKQKQEWICLETLTPDTQYEFQVRVKPLQGEFTTWSPWSQPLAFRTKPAALGKD |
| [symbol] A670 | DKTHTCPPCPAPELLGGPSVFLFPPKPKDTLMISRTPEVTCVVVDVSHEDPEVKFNWYVDGVEVHNAKTKPREEQYN |
| | STYRVVSVLTVLHQDWLNGKEYKCKVSNKALPAPIEKTISKAKGQPREPQVYTLPPCRDELTKNQVSLWCLVKGFYPS |
| | DIAVEWESNGQPENNYKTTPPVLDSDGSFFLYSKLTVDKSRWQQGNVFSCSVMHEALHNHYTQKSLSLSPGGGSSP |
| | PGGGSSGGGSGPAPTSSSTKKTQLQLEHLLLDLQMILNGINNYKNPKLTAMLTAKFAMPKKATELKHLQCLEEALKPL |
| | EEVLNLAQSKNFHLRPRDLISNINVIVLELKGSETTFMCEYADETATIVEFLNRWITFAQSIISTLT |
| [symbol] A671 | DKTHTCPPCPAPELLGGPSVFLFPPKPKDTLMISRTPEVTCVVVDVSHEDPEVKFNWYVDGVEVHNAKTKPREEQYN |
| | STYRVVSVLTVLHQDWLNGKEYKCKVSNKALPAPIEKTISKAKGQPREPQVYTLPPCRDELTKNQVSLWCLVKGFYPS |
| | DIAVEWESNGQPENNYKTTPPVLDSDGSFFLYSKLTVDKSRWQQGNVFSCSVMHEALHNHYTQKSLSLSPGGSPGV |
| | PLSLYSGPAPTSSSTKKTQLQLEHLLLDLQMILNGINNYKNPKLTAMLTAKFAMPKKATELKHLQCLEEALKPLEEVLNL |
| | AQSKNFHLRPRDLISNINVIVLELKGSETTFMCEYADETATIVEFLNRWITFAQSIISTLT |
| [symbol] A672 | DKTHTCPPCPAPELLGGPSVFLFPPKPKDTLMISRTPEVTCVVVDVSHEDPEVKFNWYVDGVEVHNAKTKPREEQYN |
| | STYRVVSVLTVLHQDWLNGKEYKCKVSNKALPAPIEKTISKAKGQPREPQVCTLPPSRDELTKNQVSLSCAVKGFYPSD |
| | IAVEWESNGQPENNYKTTPPVLDSDGSFFLVSKLTVDKSRWQQGNVFSCSVMHEALHNHYTQKSLSLSPGGPPSGS |
| | SPGVPLSLYGSGGGAVNGTSQFTCFYNSRANISCVWSQDGALQDTSCQVHAWPDRRRWNQTCELLPVSQASWAC |
| | NLILGAPDSQKLTTVDIVTLRVLCREGVRWRVMAIQDFKPFENLRLMAPISLQVVHVETHRCNISWEISQASHYFERH |
| | LEFEARTLSPGHTWEEAPLLTLKQKQEWICLETLTPDTQYEFQVRVKPLQGEFTTWSPWSQPLAFRTKPAALGKD |

[symbol]

indicates data missing or illegible when filed

The application's sequence listing, which the Patent Office published only in electronic form, follows.

SEQUENCE LISTING (324 sequences)

SEQ ID NO: 1 - protein, 153 aa, Artificial Sequence
  Cytokine
MYRMQLLSCIALSLALVTNSAPTSSSTKKTQLQLEHLLLDLQMILNGINNYKNPKLTRMLTFKFYMPKKATELKHLQCLEEELKPLEEVLNLAQSKNFHLRPRDLISNINVIVLELKGSETTFMCEYADETATIVEFLNRWITFCQSIISTLT

SEQ ID NO: 2 - protein, 133 aa, Artificial Sequence [sequence omitted]

SEQ ID NO: 3 - protein, 133 aa, Artificial Sequence
  Cytokine
APTSSSTKKTQLQLEHLLLDLQMILNGINNYKNPKLTAMLTAKFAMPKKATELKHLQCLEEALKPLEEVLNLAQSKNFHLRPRDLISNINVIVLELKGSETTFMCEYADETATIVEFLNRWITFAQSIISTLT

SEQ ID NO: 4 - protein, 213 aa, Artificial Sequence
  Masking moiety
AVNGTSQFTCFYNSRANISCVWSQDGALQDTSCQVHAWPDRRRWNQTCELLPVSQASWACNLILGAPDSQKLTTVDIVTLRVLCREGVRWRVMAIQDFKPFENLRLMAPISLQVVHVETHRCNISWEISQASHYFERHLEFEARTLSPGHTWEEAPLLTLKQKQEWICLETLTPDTQYEFQVRVKPLQGEFTTWSPWSQPLAFRTKPAALGKD

SEQ ID NO: 5 - protein, 213 aa, Artificial Sequence
  Masking moiety
AVNGTSQFTCFYNSRANISCVWSQDGALQDTSCQVHAWPDRRRWNQTCELLPVSQASWACNLILGAPDSQKLTTVDIVTLRVLCREGVRWRVMAIQDFKPFENLRLMAPISLQVVHVETHRSNISWEISQASHYFERHLEFEARTLSPGHTWEEAPLLTLKQKQEWISLETLTPDTQYEFQVRVKPLQGEFTTWSPWSQPLAFRTKPAALGKD

SEQ ID NO: 6 - protein, 330 aa, Artificial Sequence [sequence omitted]

SEQ ID NO: 7 - protein, 226 aa, Artificial Sequence
  Fc
DKTHTCPPCPAPELLGGPSVFLFPPKPKDTLMISRTPEVTCVVVDVSHEDPEVKFNWYVDGVEVHNAKTKPREEQYNSTYRVVSVLTVLHQDWLNGKEYKCKVSNKALPAPIEKTISKAKGQPREPQVYTLPPSRDELTKNQVSLTCLVKGFYPSDIAVEWESNGQPENNYKTTPPVLDSDGSFFLYSKLTVDKSRWQQGNVFSCSVMHEALHNHYTQKSLSLSPG

SEQ ID NO: 8 - protein, 226 aa, Artificial Sequence
  Fc
DKTHTCPPCPAPELLGGPSVFLFPPKPKDTLMISRTPEVTCVVVDVSHEDPEVKFNWYVDGVEVHNAKTKPREEQYNSTYRVVSVLTVLHQDWLNGKEYKCKVSNKALPAPIEKTISKAKGQPREPQVCTLPPSRDELTKNQVSLSCAVKGFYPSDIAVEWESNGQPENNYKTTPPVLDSDGSFFLVSKLTVDKSRWQQGNVFSCSVMHEALHNHYTQKSLSLSPG

SEQ ID NO: 9 - protein, 226 aa, Artificial Sequence
  Fc
DKTHTCPPCPAPELLGGPSVFLFPPKPKDTLMISRTPEVTCVVVDVSHEDPEVKFNWYVDGVEVHNAKTKPREEQYASTYRVVSVLTVLHQDWLNGKEYKCKVSNKALPAPIEKTISKAKGQPREPQVCTLPPSRDELTKNQVSLSCAVKGFYPSDIAVEWESNGQPENNYKTTPPVLDSDGSFFLVSKLTVDKSRWQQGNVFSCSVMHEALHNHYTQKSLSLSPG

SEQ ID NO: 10 - protein, 226 aa, Artificial Sequence
  Fc
DKTHTCPPCPAPELLGGPSVFLFPPKPKDTLMASRTPEVTCVVVDVSHEDPEVKFNWYVDGVEVHNAKTKPREEQYASTYRVVSVLTVLHQDWLNGKEYKCKVSNKALPAPIEKTISKAKGQPREPQVCTLPPSRDELTKNQVSLSCAVKGFYPSDIAVEWESNGQPENNYKTTPPVLDSDGSFFLVSKLTVDKSRWQQGNVFSCSVMHEALHNHYTQKSLSLSPG

SEQ ID NO: 11 - protein, 227 aa, Artificial Sequence
  Fc
DKTHTCPPCPAPELLGGPSVFLFPPKPKDTLMISRTPEVTCVVVDVSHEDPEVKFNWYVDGVEVHNAKTKPREEQYNSTYRVVSVLTVLHQDWLNGKEYKCKVSNKALPAPIEKTISKAKGQPREPQVYTLPPCRDELTKNQVSLWCLVKGFYPSDIAVEWESNGQPENNYKTTPPVLDSDGSFFLYSKLTVDKSRWQQGNVFSCSVMHEALHNHYTQKSLSLSPGK

SEQ ID NO: 12 - protein, 226 aa, Artificial Sequence
  Fc
DKTHTCPPCPAPELLGGPSVFLFPPKPKDTLMISRTPEVTCVVVDVSHEDPEVKFNWYVDGVEVHNAKTKPREEQYASTYRVVSVLTVLHQDWLNGKEYKCKVSNKALPAPIEKTISKAKGQPREPQVYTLPPCRDELTKNQVSLWCLVKGFYPSDIAVEWESNGQPENNYKTTPPVLDSDGSFFLYSKLTVDKSRWQQGNVFSCSVMHEALHNHYTQKSLSLSPG

SEQ ID NO: 13 - protein, 226 aa, Artificial Sequence
  Fc
DKTHTCPPCPAPELLGGPSVFLFPPKPKDTLMASRTPEVTCVVVDVSHEDPEVKFNWYVDGVEVHNAKTKPREEQYASTYRVVSVLTVLHQDWLNGKEYKCKVSNKALPAPIEKTISKAKGQPREPQVYTLPPCRDELTKNQVSLWCLVKGFYPSDIAVEWESNGQPENNYKTTPPVLDSDGSFFLYSKLTVDKSRWQQGNVFSCSVMHEALHNHYTQKSLSLSPG

SEQ ID NO: 14 - protein, 5 aa, Artificial Sequence
  Linker
PGSGS

SEQ ID NO: 15 - protein, 21 aa, Artificial Sequence
  Linker
GPPSGSSPGDSGGFMLTSGGG

SEQ ID NO: 16 - protein, 20 aa, Artificial Sequence
  Linker
GPPSGSSPGVPLSLYGSGGG

SEQ ID NO: 17 - protein, 20 aa, Artificial Sequence
  Linker
GPPSGSSPMPYDLYHPSGGG

SEQ ID NO: 18 - protein, 17 aa, Artificial Sequence
  Linker
GGSSPPMPYDLYHPSGP

SEQ ID NO: 19 - protein, 13 aa, Artificial Sequence
  Linker
GSPGVPLSLYSGP

SEQ ID NO: 20 - protein, 15 aa, Artificial Sequence
  Linker
GGSGRAAAVKSPSGP

SEQ ID NO: 21 - protein, 13 aa, Artificial Sequence
  Linker
GGSGHEQLTVSGP

SEQ ID NO: 22 - protein, 15 aa, Artificial Sequence
  Linker
GSGPDSGGFMLTSGP

SEQ ID NO: 23 - protein, 17 aa, Artificial Sequence
  Linker
GGSSPPGGGSSGGGSGP

SEQ ID NO: 24 - protein, 8 aa, Artificial Sequence
  Cleavable peptide
MPYDLYHP

SEQ ID NO: 25 - protein, 8 aa, Artificial Sequence
  Cleavable peptide
DSGGFMLT

SEQ ID NO: 26 - protein, 6 aa, Artificial Sequence
  Cleavable peptide
HEQLTV

SEQ ID NO: 27 - protein, 8 aa, Artificial Sequence
  Cleavable peptide
RAAAVKSP

SEQ ID NO: 28 - protein, 6 aa, Artificial Sequence
  Cleavable peptide
VPLSLY

SEQ ID NO: 29 - skipped

SEQ ID NO: 30 - protein, 4 aa, Artificial Sequence
  Linker
SGGG

SEQ ID NO: 31 - protein, 5 aa, Artificial Sequence
  Linker
GSGGG

SEQ ID NO: 32 - protein, 6 aa, Artificial Sequence
  Linker
GGSSPP

SEQ ID NO: 33 - protein, 4 aa, Artificial Sequence
  Linker
GSGP

SEQ ID NO: 34 - protein, 4 aa, Artificial Sequence
  Linker
GSPG

SEQ ID NO: 35 - protein, 4 aa, Artificial Sequence
  Linker
GGSG

SEQ ID NO: 36 - protein, 9 aa, Artificial Sequence
  Linker
GPPSGSSPG

SEQ ID NO: 37 - protein, 8 aa, Artificial Sequence
  Linker
GPPSGSSP

SEQ ID NO: 38 - protein, 444 aa, Artificial Sequence
  Polypeptide chain
DKTHTCPPCPAPELLGGPSVFLFPPKPKDTLMISRTPEVTCVVVDVSHEDPEVKFNWYVDGVEVHNAKTKPREEQYASTYRVVSVLTVLHQDWLNGKEYKCKVSNKALPAPIEKTISKAKGQPREPQVCTLPPSRDELTKNQVSLSCAVKGFYPSDIAVEWESNGQPENNYKTTPPVLDSDGSFFLVSKLTVDKSRWQQGNVFSCSVMHEALHNHYTQKSLSLSPGPGSGSAVNGTSQFTCFYNSRANISCVWSQDGALQDTSCQVHAWPDRRRWNQTCELLPVSQASWACNLILGAPDSQKLTTVDIVTLRVLCREGVRWRVMAIQDFKPFENLRLMAPISLQVVHVETHRCNISWEISQASHYFERHLEFEARTLSPGHTWEEAPLLTLKQKQEWICLETLTPDTQYEFQVRVKPLQGEFTTWSPWSQPLAFRTKPAALGKD

SEQ ID NO: 39 - protein, 444 aa, Artificial Sequence
  Polypeptide chain
DKTHTCPPCPAPELLGGPSVFLFPPKPKDTLMISRTPEVTCVVVDVSHEDPEVKFNWYVDGVEVHNAKTKPREEQYASTYRVVSVLTVLHQDWLNGKEYKCKVSNKALPAPIEKTISKAKGQPREPQVCTLPPSRDELTKNQVSLSCAVKGFYPSDIAVEWESNGQPENNYKTTPPVLDSDGSFFLVSKLTVDKSRWQQGNVFSCSVMHEALHNHYTQKSLSLSPGPGSGSAVNGTSQFTCFYNSRANISCVWSQDGALQDTSCQVHAWPDRRRWNQTCELLPVSQASWACNLILGAPDSQKLTTVDIVTLRVLCREGVRWRVMAIQDFKPFENLRLMAPISLQVVHVETHRSNISWEISQASHYFERHLEFEARTLSPGHTWEEAPLLTLKQKQEWISLETLTPDTQYEFQVRVKPLQGEFTTWSPWSQPLAFRTKPAALGKD

SEQ ID NO: 40 - protein, 459 aa, Artificial Sequence
  Polypeptide chain
DKTHTCPPCPAPELLGGPSVFLFPPKPKDTLMISRTPEVTCVVVDVSHEDPEVKFNWYVDGVEVHNAKTKPREEQYASTYRVVSVLTVLHQDWLNGKEYKCKVSNKALPAPIEKTISKAKGQPREPQVCTLPPSRDELTKNQVSLSCAVKGFYPSDIAVEWESNGQPENNYKTTPPVLDSDGSFFLVSKLTVDKSRWQQGNVFSCSVMHEALHNHYTQKSLSLSPGGPPSGSSPMPYDLYHPSGGGAVNGTSQFTCFYNSRANISCVWSQDGALQDTSCQVHAWPDRRRWNQTCELLPVSQASWACNLILGAPDSQKLTTVDIVTLRVLCREGVRWRVMAIQDFKPFENLRLMAPISLQVVHVETHRSNISWEISQASHYFERHLEFEARTLSPGHTWEEAPLLTLKQKQEWISLETLTPDTQYEFQVRVKPLQGEFTTWSPWSQPLAFRTKPAALGKD

SEQ ID NO: 41 - protein, 460 aa, Artificial Sequence
  Polypeptide chain
DKTHTCPPCPAPELLGGPSVFLFPPKPKDTLMISRTPEVTCVVVDVSHEDPEVKFNWYVDGVEVHNAKTKPREEQYASTYRVVSVLTVLHQDWLNGKEYKCKVSNKALPAPIEKTISKAKGQPREPQVCTLPPSRDELTKNQVSLSCAVKGFYPSDIAVEWESNGQPENNYKTTPPVLDSDGSFFLVSKLTVDKSRWQQGNVFSCSVMHEALHNHYTQKSLSLSPGGPPSGSSPGDSGGFMLTSGGGAVNGTSQFTCFYNSRANISCVWSQDGALQDTSCQVHAWPDRRRWNQTCELLPVSQASWACNLILGAPDSQKLTTVDIVTLRVLCREGVRWRVMAIQDFKPFENLRLMAPISLQVVHVETHRCNISWEISQASHYFERHLEFEARTLSPGHTWEEAPLLTLKQKQEWICLETLTPDTQYEFQVRVKPLQGEFTTWSPWSQPLAFRTKPAALGKD

SEQ ID NO: 42 - protein, 459 aa, Artificial Sequence
  Polypeptide chain
DKTHTCPPCPAPELLGGPSVFLFPPKPKDTLMISRTPEVTCVVVDVSHEDPEVKFNWYVDGVEVHNAKTKPREEQYASTYRVVSVLTVLHQDWLNGKEYKCKVSNKALPAPIEKTISKAKGQPREPQVCTLPPSRDELTKNQVSLSCAVKGFYPSDIAVEWESNGQPENNYKTTPPVLDSDGSFFLVSKLTVDKSRWQQGNVFSCSVMHEALHNHYTQKSLSLSPGGPPSGSSPGVPLSLYGSGGGAVNGTSQFTCFYNSRANISCVWSQDGALQDTSCQVHAWPDRRRWNQTCELLPVSQASWACNLILGAPDSQKLTTVDIVTLRVLCREGVRWRVMAIQDFKPFENLRLMAPISLQVVHVETHRCNISWEISQASHYFERHLEFEARTLSPGHTWEEAPLLTLKQKQEWICLETLTPDTQYEFQVRVKPLQGEFTTWSPWSQPLAFRTKPAALGKD

SEQ ID NO: 43 - protein, 444 aa, Artificial Sequence
  Polypeptide chain
DKTHTCPPCPAPELLGGPSVFLFPPKPKDTLMASRTPEVTCVVVDVSHEDPEVKFNWYVDGVEVHNAKTKPREEQYASTYRVVSVLTVLHQDWLNGKEYKCKVSNKALPAPIEKTISKAKGQPREPQVCTLPPSRDELTKNQVSLSCAVKGFYPSDIAVEWESNGQPENNYKTTPPVLDSDGSFFLVSKLTVDKSRWQQGNVFSCSVMHEALHNHYTQKSLSLSPGPGSGSAVNGTSQFTCFYNSRANISCVWSQDGALQDTSCQVHAWPDRRRWNQTCELLPVSQASWACNLILGAPDSQKLTTVDIVTLRVLCREGVRWRVMAIQDFKPFENLRLMAPISLQVVHVETHRCNISWEISQASHYFERHLEFEARTLSPGHTWEEAPLLTLKQKQEWICLETLTPDTQYEFQVRVKPLQGEFTTWSPWSQPLAFRTKPAALGKD

SEQ ID NO: 44 - protein, 459 aa, Artificial Sequence
  Polypeptide chain
DKTHTCPPCPAPELLGGPSVFLFPPKPKDTLMISRTPEVTCVVVDVSHEDPEVKFNWYVDGVEVHNAKTKPREEQYASTYRVVSVLTVLHQDWLNGKEYKCKVSNKALPAPIEKTISKAKGQPREPQVCTLPPSRDELTKNQVSLSCAVKGFYPSDIAVEWESNGQPENNYKTTPPVLDSDGSFFLVSKLTVDKSRWQQGNVFSCSVMHEALHNHYTQKSLSLSPGGPPSGSSPMPYDLYHPSGGGAVNGTSQFTCFYNSRANISCVWSQDGALQDTSCQVHAWPDRRRWNQTCELLPVSQASWACNLILGAPDSQKLTTVDIVTLRVLCREGVRWRVMAIQDFKPFENLRLMAPISLQVVHVETHRCNISWEISQASHYFERHLEFEARTLSPGHTWEEAPLLTLKQKQEWICLETLTPDTQYEFQVRVKPLQGEFTTWSPWSQPLAFRTKPAALGKD

SEQ ID NO: 45 - protein, 376 aa, Artificial Sequence
  Polypeptide chain
DKTHTCPPCPAPELLGGPSVFLFPPKPKDTLMISRTPEVTCVVVDVSHEDPEVKFNWYVDGVEVHNAKTKPREEQYASTYRVVSVLTVLHQDWLNGKEYKCKVSNKALPAPIEKTISKAKGQPREPQVYTLPPCRDELTKNQVSLWCLVKGFYPSDIAVEWESNGQPENNYKTTPPVLDSDGSFFLYSKLTVDKSRWQQGNVFSCSVMHEALHNHYTQKSLSLSPGGGSSPPMPYDLYHPSGPAPTSSSTKKTQLQLEHLLLDLQMILNGINNYKNPKLTAMLTAKFAMPKKATELKHLQCLEEALKPLEEVLNLAQSKNFHLRPRDLISNINVIVLELKGSETTFMCEYADETATIVEFLNRWITFAQSIISTLT

SEQ ID NO: 46 - protein, 374 aa, Artificial Sequence
  Polypeptide chain
DKTHTCPPCPAPELLGGPSVFLFPPKPKDTLMISRTPEVTCVVVDVSHEDPEVKFNWYVDGVEVHNAKTKPREEQYASTYRVVSVLTVLHQDWLNGKEYKCKVSNKALPAPIEKTISKAKGQPREPQVYTLPPCRDELTKNQVSLWCLVKGFYPSDIAVEWESNGQPENNYKTTPPVLDSDGSFFLYSKLTVDKSRWQQGNVFSCSVMHEALHNHYTQKSLSLSPGGGSGRAAAVKSPSGPAPTSSSTKKTQLQLEHLLLDLQMILNGINNYKNPKLTAMLTAKFAMPKKATELKHLQCLEEALKPLEEVLNLAQSKNFHLRPRDLISNINVIVLELKGSETTFMCEYADETATIVEFLNRWITFAQSIISTLT

SEQ ID NO: 47 - protein, 372 aa, Artificial Sequence
  Polypeptide chain
DKTHTCPPCPAPELLGGPSVFLFPPKPKDTLMISRTPEVTCVVVDVSHEDPEVKFNWYVDGVEVHNAKTKPREEQYASTYRVVSVLTVLHQDWLNGKEYKCKVSNKALPAPIEKTISKAKGQPREPQVYTLPPCRDELTKNQVSLWCLVKGFYPSDIAVEWESNGQPENNYKTTPPVLDSDGSFFLYSKLTVDKSRWQQGNVFSCSVMHEALHNHYTQKSLSLSPGGGSGHEQLTVSGPAPTSSSTKKTQLQLEHLLLDLQMILNGINNYKNPKLTAMLTAKFAMPKKATELKHLQCLEEALKPLEEVLNLAQSKNFHLRPRDLISNINVIVLELKGSETTFMCEYADETATIVEFLNRWITFAQSIISTLT

SEQ ID NO: 48 - protein, 374 aa, Artificial Sequence
  Polypeptide chain
DKTHTCPPCPAPELLGGPSVFLFPPKPKDTLMISRTPEVTCVVVDVSHEDPEVKFNWYVDGVEVHNAKTKPREEQYASTYRVVSVLTVLHQDWLNGKEYKCKVSNKALPAPIEKTISKAKGQPREPQVYTLPPCRDELTKNQVSLWCLVKGFYPSDIAVEWESNGQPENNYKTTPPVLDSDGSFFLYSKLTVDKSRWQQGNVFSCSVMHEALHNHYTQKSLSLSPGGSGPDSGGFMLTSGPAPTSSSTKKTQLQLEHLLLDLQMILNGINNYKNPKLTAMLTAKFAMPKKATELKHLQCLEEALKPLEEVLNLAQSKNFHLRPRDLISNINVIVLELKGSETTFMCEYADETATIVEFLNRWITFAQSIISTLT

SEQ ID NO: 49 - protein, 372 aa, Artificial Sequence
  Polypeptide chain
DKTHTCPPCPAPELLGGPSVFLFPPKPKDTLMISRTPEVTCVVVDVSHEDPEVKFNWYVDGVEVHNAKTKPREEQYASTYRVVSVLTVLHQDWLNGKEYKCKVSNKALPAPIEKTISKAKGQPREPQVYTLPPCRDELTKNQVSLWCLVKGFYPSDIAVEWESNGQPENNYKTTPPVLDSDGSFFLYSKLTVDKSRWQQGNVFSCSVMHEALHNHYTQKSLSLSPGGSPGVPLSLYSGPAPTSSSTKKTQLQLEHLLLDLQMILNGINNYKNPKLTAMLTAKFAMPKKATELKHLQCLEEALKPLEEVLNLAQSKNFHLRPRDLISNINVIVLELKGSETTFMCEYADETATIVEFLNRWITFAQSIISTLT

SEQ ID NO: 50 - protein, 372 aa, Artificial Sequence
  Polypeptide chain
DKTHTCPPCPAPELLGGPSVFLFPPKPKDTLMASRTPEVTCVVVDVSHEDPEVKFNWYVDGVEVHNAKTKPREEQYASTYRVVSVLTVLHQDWLNGKEYKCKVSNKALPAPIEKTISKAKGQPREPQVYTLPPCRDELTKNQVSLWCLVKGFYPSDIAVEWESNGQPENNYKTTPPVLDSDGSFFLYSKLTVDKSRWQQGNVFSCSVMHEALHNHYTQKSLSLSPGGSPGVPLSLYSGPAPTSSSTKKTQLQLEHLLLDLQMILNGINNYKNPKLTAMLTAKFAMPKKATELKHLQCLEEALKPLEEVLNLAQSKNFHLRPRDLISNINVIVLELKGSETTFMCEYADETATIVEFLNRWITFAQSIISTLT

SEQ ID NO: 51 - protein, 376 aa, Artificial Sequence
  Polypeptide chain
DKTHTCPPCPAPELLGGPSVFLFPPKPKDTLMISRTPEVTCVVVDVSHEDPEVKFNWYVDGVEVHNAKTKPREEQYASTYRVVSVLTVLHQDWLNGKEYKCKVSNKALPAPIEKTISKAKGQPREPQVYTLPPCRDELTKNQVSLWCLVKGFYPSDIAVEWESNGQPENNYKTTPPVLDSDGSFFLYSKLTVDKSRWQQGNVFSCSVMHEALHNHYTQKSLSLSPGGGSSPPGGGSSGGGSGPAPTSSSTKKTQLQLEHLLLDLQMILNGINNYKNPKLTAMLTAKFAMPKKATELKHLQCLEEALKPLEEVLNLAQSKNFHLRPRDLISNINVIVLELKGSETTFMCEYADETATIVEFLNRWITFAQSIISTLT

SEQ ID NO: 52 - protein, 140 aa, Artificial Sequence
  Cleavage product
LYHPSGPAPTSSSTKKTQLQLEHLLLDLQMILNGINNYKNPKLTAMLTAKFAMPKKATELKHLQCLEEALKPLEEVLNLAQSKNFHLRPRDLISNINVIVLELKGSETTFMCEYADETATIVEFLNRWITFAQSIISTLT

SEQ ID NO: 53 - protein, 140 aa, Artificial Sequence
  Cleavage product
VKSPSGPAPTSSSTKKTQLQLEHLLLDLQMILNGINNYKNPKLTAMLTAKFAMPKKATELKHLQCLEEALKPLEEVLNLAQSKNFHLRPRDLISNINVIVLELKGSETTFMCEYADETATIVEFLNRWITFAQSIISTLT

SEQ ID NO: 54 - protein, 139 aa, Artificial Sequence
  Cleavage product
LTVSGPAPTSSSTKKTQLQLEHLLLDLQMILNGINNYKNPKLTAMLTAKFAMPKKATELKHLQCLEEALKPLEEVLNLAQSKNFHLRPRDLISNINVIVLELKGSETTFMCEYADETATIVEFLNRWITFAQSIISTLT

SEQ ID NO: 55 - protein, 140 aa, Artificial Sequence
  Cleavage product
FMLTSGPAPTSSSTKKTQLQLEHLLLDLQMILNGINNYKNPKLTAMLTAKFAMPKKATELKHLQCLEEALKPLEEVLNLAQSKNFHLRPRDLISNINVIVLELKGSETTFMCEYADETATIVEFLNRWITFAQSIISTLT

SEQ ID NO: 56 - protein, 138 aa, Artificial Sequence
  Cleavage product
LYSGPAPTSSSTKKTQLQLEHLLLDLQMILNGINNYKNPKLTAMLTAKFAMPKKATELKHLQCLEEALKPLEEVLNLAQSKNFHLRPRDLISNINVIVLELKGSETTFMCEYADETATIVEFLNRWITFAQSIISTLT

SEQ ID NO: 57-59 - skipped (3 entries)

SEQ ID NO: 60 - protein, 164 aa, Artificial Sequence
  Masking moiety
ELCDDDPPEIPHATFKAMAYKEGTMLNCECKRGFRRIKSGSLYMLCTGNSSHSSWDNQCQCTSSATRNTTKQVTPQPEEQKERKTTEMQSPMQPVDQASLPGHCREPPPWENEATERIYHFVVGQMVYYQCVQGYRALHRGPAESVCKMTHGKTRWTQPQLICT

SEQ ID NO: 61 - skipped

SEQ ID NO: 62 - protein, 133 aa, Artificial Sequence
  Cytokine
APTSSSTKKTQLQLEHLLLDLQMILNGINNYKNPKLTRMLTFKFYMPKKATELKHLQCLEEELKPLEEVLNLAQSKNFHLRPRDLISNINVIVLELKGSETTFMCEYADETATIVEFLNRWITFAQSIISTLT

SEQ ID NO: 63 - protein, 35 aa, Artificial Sequence
  Linker
GGGGGGGGGGGGGGGGGGGGGGGGGGGGGGGGGGG

SEQ ID NO: 64 - protein, 188 aa, Artificial Sequence
  Masking moiety
AVNGTSQFTCFYNSRANISCVWSQDGALQDTSCQVHAWPDRRRWNQTCELLPVSQASWACNLILGAPDSQKLTTVDIVTLRVLCREGVRWRVMAIQDFKPFENLRLMAPISLQVVHVETHRCNISWEISQASHYFERHLEFEARTLSPGHTWEEAPLLTLKQKQEWICLETLTPDTQYEFQVRVKPLQ

SEQ ID NO: 65 - protein, 226 aa, Artificial Sequence
  Fc
DKTHTCPPCPAPELLGGPSVFLFPPKPKDTLMISRTPEVTCVVVDVSHEDPEVKFNWYVDGVEVHNAKTKPREEQYASTYRVVSVLTVLHQDWLNGKEYKCKVSNKALPAPIEKTISKAKGQPREPQVYTLPPSRDELTKNQVSLTCLVKGFYPSDIAVEWESNGQPENNYKTTPPVLDSDGSFFLYSKLTVDKSRWQQGNVFSCSVMHEALHNHYTQKSLSLSPG

SEQ ID NO: 66 - protein, 767 aa, Artificial Sequence
  Polypeptide chain
DKTHTCPPCPAPELLGGPSVFLFPPKPKDTLMISRTPEVTCVVVDVSHEDPEVKFNWYVDGVEVHNAKTKPREEQYASTYRVVSVLTVLHQDWLNGKEYKCKVSNKALPAPIEKTISKAKGQPREPQVYTLPPSRDELTKNQVSLTCLVKGFYPSDIAVEWESNGQPENNYKTTPPVLDSDGSFFLYSKLTVDKSRWQQGNVFSCSVMHEALHNHYTQKSLSLSPGPAELCDDDPPEIPHATFKAMAYKEGTMLNCECKRGFRRIKSGSLYMLCTGNSSHSSWDNQCQCTSSATRNTTKQVTPQPEEQKERKTTEMQSPMQPVDQASLPGHCREPPPWENEATERIYHFVVGQMVYYQCVQGYRALHRGPAESVCKMTHGKTRWTQPQLICTGGGGGGGGGGGGGGGGGGGGGGGGGGGGGGGGGGGAPTSSSTKKTQLQLEHLLLDLQMILNGINNYKNPKLTRMLTFKFYMPKKATELKHLQCLEEELKPLEEVLNLAQSKNFHLRPRDLISNINVIVLELKGSETTFMCEYADETATIVEFLNRWITFAQSIISTLTGPPSGSSPMPYDLYHPSGGGAVNGTSQFTCFYNSRANISCVWSQDGALQDTSCQVHAWPDRRRWNQTCELLPVSQASWACNLILGAPDSQKLTTVDIVTLRVLCREGVRWRVMAIQDFKPFENLRLMAPISLQWHVETHRCNISWEISQASHYFERHLEFEARTLSPGHTWEEAPLLTLKQKQEWICLETLTPDTQYEFQVRVKPLQ

SEQ ID NO: 67 - protein, 359 aa, Artificial Sequence
  Polypeptide chain
DKTHTCPPCPAPELLGGPSVFLFPPKPKDTLMISRTPEVTCVVVDVSHEDPEVKFNWYVDGVEVHNAKTKPREEQYASTYRVVSVLTVLHQDWLNGKEYKCKVSNKALPAPIEKTISKAKGQPREPQVYTLPPSRDELTKNQVSLTCLVKGFYPSDIAVEWESNGQPENNYKTTPPVLDSDGSFFLYSKLTVDKSRWQQGNVFSCSVMHEALHNHYTQKSLSLSPGAPTSSSTKKTQLQLEHLLLDLQMILNGINNYKNPKLTRMLTFKFYMPKKATELKHLQCLEEELKPLEEVLNLAQSKNFHLRPRDLISNINVIVLELKGSETTFMCEYADETATIVEFLNRWITFAQSIISTLT

SEQ ID NO: 68 - protein, 359 aa, Artificial Sequence
  Polypeptide chain
DKTHTCPPCPAPELLGGPSVFLFPPKPKDTLMISRTPEVTCVVVDVSHEDPEVKFNWYVDGVEVHNAKTKPREEQYASTYRVVSVLTVLHQDWLNGKEYKCKVSNKALPAPIEKTISKAKGQPREPQVYTLPPSRDELTKNQVSLTCLVKGFYPSDIAVEWESNGQPENNYKTTPPVLDSDGSFFLYSKLTVDKSRWQQGNVFSCSVMHEALHNHYTQKSLSLSPGAPTSSSTKKTQLQLEHLLLDLQMILNGINNYKNPKLTAMLTAKFAMPKKATELKHLQCLEEALKPLEEVLNLAQSKNFHLRPRDLISNINVIVLELKGSETTFMCEYADETATIVEFLNRWITFAQSIISTLT

SEQ ID NO: 69 - protein, 133 aa, Artificial Sequence
  Cytokine
APTSSSTKKTQLQLEHLLLDLQMILNGINNYKNPKLTRMLTFKFYMPKKATELKHLQCLEERLKPLEEVLNLAQSKNFHLRPRDLISNINVIVLELKGSETTFMCEYADETATIVEFLNRWITFAQSIISTLT

SEQ ID NO: 70 - protein, 133 aa, Artificial Sequence
  Cytokine
APTSSSTKKTQLQLEHLLLDLQMILNGINNYKNPKLTRMLTEKFYMPKKATELKHLQCLEEELKPLEEVLNLAQSKNFHLRPRDLISNINVIVLELKGSETTFMCEYADETATIVEFLNRWITFAQSIISTLT

SEQ ID NO: 71 - protein, 133 aa, Artificial Sequence
  Cytokine
APTSSSTKKTQLQLEHLLLDLQMILNGINNYKNPKLTRMLTFKFYMPKKATELKHLQCLEFSLKPLFFVLNLAQSKNFHLRPRDLISNINVIVLFLKGSETTFMCFYADFTATIVFFLNRWITFAQSIISTLT

SEQ ID NO: 72 - protein, 133 aa, Artificial Sequence
  Cytokine
APTSSSTKKTQLQLEHLLLDLQMILNGINNYKNPKLTRMLTAKFYMPKKATELKHLQCLEEELKPLEEVLNLAQSKNFHLRPRDLISNINVIVLELKGSETTFMCEYADETATIVEFLNRWITFAQSIISTLT

SEQ ID NO: 73 - protein, 133 aa, Artificial Sequence
  Cytokine
APTSSSTKKTQLQLEHLLLDLQMILNGINNYKNPKLTRMLTFKFRMPKKATELKHLQCLEEELKPLEEVLNLAQSKNFHLRPRDLISNINVIVLELKGSETTFMCEYADETATIVEFLNRWITFAQSIISTLT

SEQ ID NO: 74 - protein, 133 aa, Artificial Sequence
  Cytokine
APTSSSTKKTQLQLEHLLLDLQMILNGINNYKNPKLTRMLTSKFYMPKKATELKHLQCLEESLKPLEEVLNLAQSKNFHLRPRDLISNINVIVLELKGSETTFMCEYADETATIVEFLNRWITFAQSIISTLT

SEQ ID NO: 75 - protein, 4 aa, Artificial Sequence
  Linker
PGSG

SEQ ID NO: 76 - protein, 17 aa, Artificial Sequence
  Linker
GGSSPPRAAAVKSPSGP

SEQ ID NO: 77 - protein, 17 aa, Artificial Sequence
  Linker
GGPGGPRAAAVKSPSGP

SEQ ID NO: 78 - protein, 13 aa, Artificial Sequence
  Linker
GSPGVPLSLYSGP

SEQ ID NO: 79 - protein, 227 aa, Artificial Sequence
  Fc
DKTHTCPPCPAPELLGGPSVFLFPPKPKDTLMISRTPEVTCVVVDVSHEDPEVKFNWYVDGVEVHNAKTKPREEQYASTYRVVSVLTVLHQDWLNGKEYKCKVSNKALPAPIEKTISKAKGQPREPQVCTLPPSRDELTKNQVSLSCAVKGFYPSDIAVEWESNGQPENNYKTTPPVLDSDGSFFLVSKLTVDKSRWQQGNVFSCSVMHEALHNHYTQKSLSLSPGK

SEQ ID NO: 80 - protein, 226 aa, Artificial Sequence
  Fc
DKTHTCPPCPAPELLGGPSVFLFPPKPKDTLMISRTPEVTCVVVDVSHEDPEVKFNWYVDGVEVHNAKTKPREEQYASTYRVVSVLTVLHQDWLNGKEYKCKVSNKALPAPIEKTISKAKGQPREPQVYTLPPCRKELTKNQVSLWCLVKGFYPSDIAVEWESNGQPENNYKTTPPVLKSDGSFFLYSKLTVDKSRWQQGNVFSCSVMHEALHNHYTQKSLSLSPG

SEQ ID NO: 81 - protein, 226 aa, Artificial Sequence
  Fc
DKTHTCPPCPAPELLGGPSVFLFPPKPKDTLMISRTPEVTCVVVDVSHEDPEVKFNWYVDGVEVHNAKTKPREEQYASTYRVVSVLTVLHQDWLNGKEYKCKVSNKALPAPIEKTISKAKGQPREPQVCTLPPSRDELTKNQVSLSCAVKGFYPSDIAVEWESNGQPENNYDTTPPVLDSDGSFFLVSDLTVDKSRWQQGNVFSCSVMHEALHNHYTQKSLSLSPG

SEQ ID NO: 82 - protein, 226 aa, Artificial Sequence
  Fc
DKTHTCPPCPAPELLGGPSVFLFPPKPKDTLMISRTPEVTCVVVDVSHEDPEVKFNWYVDGVEVHNAKTKPREEQYASTYRVVSVLTVLHQDWLNGKEYKCKVSNKALPAPIEKTISKAKGQPREPQVYTLPPCRKKLTKNQVSLWCLVKGFYPSDIAVEWESNGQPENNYKTTPPVLDSDGSFFLYSKLTVDKSRWQQGNVFSCSVMHEALHNHYTQKSLSLSPG

SEQ ID NO: 83 - protein, 226 aa, Artificial Sequence
  Fc
DKTHTCPPCPAPELLGGPSVFLFPPKPKDTLMISRTPEVTCVVVDVSHEDPEVKFNWYVDGVEVHNAKTKPREEQYASTYRVVSVLTVLHQDWLNGKEYKCKVSNKALPAPIEKTISKAKGQPREPQVCTLPPSRDELTKNQVSLSCAVEGFYPSDIAVEWESNGQPENNYKTTPPVLDSDGSFFLVSKLTVDKSRWQQGNVFSCSVMHEALHNHYTQESLSLSPG

SEQ ID NO: 84 - protein, 227 aa, Artificial Sequence
  Fc
DKTHTCPPCPAPELLGGPSVFLFPPKPKDTLMISRTPEVTCVVVDVSHEDPEVKFNWYVDGVEVHNAKTKPREEQYASTYRVVSVLTVLHQDWLNGKEYKCKVSNKALPAPIEKTISKAKGQPREPQVYTLPPCRKKLTKNQVSLWCLVKGFYPSDIAVEWESNGQPENNYKTTPPVLDSDGSFFLYSKLTVDKSRWQQGNVFSCSVMHEALHNHYTQKSLSLSPGK

SEQ ID NO: 85 - protein, 376 aa, Artificial Sequence
  Polypeptide chain
DKTHTCPPCPAPELLGGPSVFLFPPKPKDTLMISRTPEVTCVVVDVSHEDPEVKFNWYVDGVEVHNAKTKPREEQYASTYRVVSVLTVLHQDWLNGKEYKCKVSNKALPAPIEKTISKAKGQPREPQVYTLPPCRDELTKNQVSLWCLVKGFYPSDIAVEWESNGQPENNYKTTPPVLDSDGSFFLYSKLTVDKSRWQQGNVFSCSVMHEALHNHYTQKSLSLSPGGGSSPPMPYDLYHPSGPAPTSSSTKKTQLQLEHLLLDLQMILNGINNYKNPKLTRMLTFKFYMPKKATELKHLQCLEEELKPLEEVLNLAQSKNFHLRPRDLISNINVIVLELKGSETTFMCEYADETATIVEFLNRWITFAQSIISTLT

SEQ ID NO: 86 - protein, 459 aa, Artificial Sequence
  Polypeptide chain
DKTHTCPPCPAPELLGGPSVFLFPPKPKDTLMISRTPEVTCVVVDVSHEDPEVKFNWYVDGVEVHNAKTKPREEQYASTYRVVSVLTVLHQDWLNGKEYKCKVSNKALPAPIEKTISKAKGQPREPQVYTLPPCRKELTKNQVSLWCLVKGFYPSDIAVEWESNGQPENNYKTTPPVLKSDGSFFLYSKLTVDKSRWQQGNVFSCSVMHEALHNHYTQKSLSLSPGGPPSGSSPMPYDLYHPSGGGAVNGTSQFTCFYNSRANISCVWSQDGALQDTSCQVHAWPDRRRWNQTCELLPVSQASWACNLILGAPDSQKLTTVDIVTLRVLCREGVRWRVMAIQDFKPFENLRLMAPISLQVVHVETHRCNISWEISQASHYFERHLEFEARTLSPGHTWEEAPLLTLKQKQEWICLETLTPDTQYEFQVRVKPLQGEFTTWSPWSQPLAFRTKPAALGKD

SEQ ID NO: 87 - protein, 359 aa, Artificial Sequence
  Polypeptide chain
DKTHTCPPCPAPELLGGPSVFLFPPKPKDTLMISRTPEVTCVVVDVSHEDPEVKFNWYVDGVEVHNAKTKPREEQYASTYRVVSVLTVLHQDWLNGKEYKCKVSNKALPAPIEKTISKAKGQPREPQVCTLPPSRDELTKNQVSLSCAVKGFYPSDIAVEWESNGQPENNYDTTPPVLDSDGSFFLVSDLTVDKSRWQQGNVFSCSVMHEALHNHYTQKSLSLSPGAPTSSSTKKTQLQLEHLLLDLQMILNGINNYKNPKLTRMLTFKFYMPKKATELKHLQCLEEELKPLEEVLNLAQSKNFHLRPRDLISNINVIVLELKGSETTFMCEYADETATIVEFLNRWITFAQSIISTLT

SEQ ID NO: 88 - protein, 459 aa, Artificial Sequence
  Polypeptide chain
DKTHTCPPCPAPELLGGPSVFLFPPKPKDTLMISRTPEVTCVVVDVSHEDPEVKFNWYVDGVEVHNAKTKPREEQYASTYRVVSVLTVLHQDWLNGKEYKCKVSNKALPAPIEKTISKAKGQPREPQVYTLPPCRKKLTKNQVSLWCLVKGFYPSDIAVEWESNGQPENNYKTTPPVLDSDGSFFLYSKLTVDKSRWQQGNVFSCSVMHEALHNHYTQKSLSLSPGGPPSGSSPMPYDLYHPSGGGAVNGTSQFTCFYNSRANISCVWSQDGALQDTSCQVHAWPDRRRWNQTCELLPVSQASWACNLILGAPDSQKLTTVDIVTLRVLCREGVRWRVMAIQDFKPFENLRLMAPISLQVVHVETHRCNISWEISQASHYFERHLEFEARTLSPGHTWEEAPLLTLKQKQEWICLETLTPDTQYEFQVRVKPLQGEFTTWSPWSQPLAFRTKPAALGKD

SEQ ID NO: 89 - protein, 359 aa, Artificial Sequence
  Polypeptide chain
DKTHTCPPCPAPELLGGPSVFLFPPKPKDTLMISRTPEVTCVVVDVSHEDPEVKFNWYVDGVEVHNAKTKPREEQYASTYRVVSVLTVLHQDWLNGKEYKCKVSNKALPAPIEKTISKAKGQPREPQVCTLPPSRDELTKNQVSLSCAVEGFYPSDIAVEWESNGQPENNYKTTPPVLDSDGSFFLVSKLTVDKSRWQQGNVFSCSVMHEALHNHYTQESLSLSPGAPTSSSTKKTQLQLEHLLLDLQMILNGINNYKNPKLTRMLTFKFYMPKKATELKHLQCLEEELKPLEEVLNLAQSKNFHLRPRDLISNINVIVLELKGSETTFMCEYADETATIVEFLNRWITFAQSIISTLT

SEQ ID NO: 90 - protein, 376 aa, Artificial Sequence
  Polypeptide chain
DKTHTCPPCPAPELLGGPSVFLFPPKPKDTLMISRTPEVTCVVVDVSHEDPEVKFNWYVDGVEVHNAKTKPREEQYASTYRVVSVLTVLHQDWLNGKEYKCKVSNKALPAPIEKTISKAKGQPREPQVCTLPPSRDELTKNQVSLSCAVEGFYPSDIAVEWESNGQPENNYKTTPPVLDSDGSFFLVSKLTVDKSRWQQGNVFSCSVMHEALHNHYTQESLSLSPGGGSSPPMPYDLYHPSGPAPTSSSTKKTQLQLEHLLLDLQMILNGINNYKNPKLTRMLTFKFYMPKKATELKHLQCLEEELKPLEEVLNLAQSKNFHLRPRDLISNINVIVLELKGSETTFMCEYADETATIVEFLNRWITFAQSIISTLT

SEQ ID NO: 91 - protein, 227 aa, Artificial Sequence; identical to SEQ ID NO: 84
  Polypeptide chain

SEQ ID NO: 92 - protein, 442 aa, Artificial Sequence
  Polypeptide chain
DKTHTCPPCPAPELLGGPSVFLFPPKPKDTLMISRTPEVTCVVVDVSHEDPEVKFNWYVDGVEVHNAKTKPREEQYASTYRVVSVLTVLHQDWLNGKEYKCKVSNKALPAPIEKTISKAKGQPREPQVYTLPPCRKKLTKNQVSLWCLVKGFYPSDIAVEWESNGQPENNYKTTPPVLDSDGSFFLYSKLTVDKSRWQQGNVFSCSVMHEALHNHYTQKSLSLSPGPGSGAVNGTSQFTCFYNSRANISCVWSQDGALQDTSCQVHAWPDRRRWNQTCELLPVSQASWACNLILGAPDSQKLTTVDIVTLRVLCREGVRWRVMAIQDFKPFENLRLMAPISLQWHVETHRCNISWEISQASHYFERHLEFEARTLSPGHTWEEAPLLTLKQKQEWICLETLTPDTQYEFQVRVKPLQGEFTTWSPWSQPLAFRTKPAALGKD

SEQ ID NO: 93 - protein, 376 aa, Artificial Sequence; identical to SEQ ID NO: 45
  Polypeptide chain

SEQ ID NO: 94 - protein, 376 aa, Artificial Sequence
  Polypeptide chain
DKTHTCPPCPAPELLGGPSVFLFPPKPKDTLMISRTPEVTCVVVDVSHEDPEVKFNWYVDGVEVHNAKTKPREEQYASTYRVVSVLTVLHQDWLNGKEYKCKVSNKALPAPIEKTISKAKGQPREPQVYTLPPCRDELTKNQVSLWCLVKGFYPSDIAVEWESNGQPENNYKTTPPVLDSDGSFFLYSKLTVDKSRWQQGNVFSCSVMHEALHNHYTQKSLSLSPGGGPGGPRAAAVKSPSGPAPTSSSTKKTQLQLEHLLLDLQMILNGINNYKNPKLTRMLTFKFYMPKKATELKHLQCLEEELKPLEEVLNLAQSKNFHLRPRDLISNINVIVLELKGSETTFMCEYADETATIVEFLNRWITFAQSIISTLT

SEQ ID NO: 95 - protein, 376 aa, Artificial Sequence
  Polypeptide chain
DKTHTCPPCPAPELLGGPSVFLFPPKPKDTLMISRTPEVTCVVVDVSHEDPEVKFNWYVDGVEVHNAKTKPREEQYASTYRVVSVLTVLHQDWLNGKEYKCKVSNKALPAPIEKTISKAKGQPREPQVYTLPPCRDELTKNQVSLWCLVKGFYPSDIAVEWESNGQPENNYKTTPPVLDSDGSFFLYSKLTVDKSRWQQGNVFSCSVMHEALHNHYTQKSLSLSPGGGSSPPRAAAVKSPSGPAPTSSSTKKTQLQLEHLLLDLQMILNGINNYKNPKLTAMLTAKFAMPKKATELKHLQCLEEALKPLEEVLNLAQSKNFHLRPRDLISNINVIVLELKGSETTFMCEYADETATIVEFLNRWITFAQSIISTLT

SEQ ID NO: 96 - protein, 376 aa, Artificial Sequence
  Polypeptide chain
DKTHTCPPCPAPELLGGPSVFLFPPKPKDTLMISRTPEVTCVVVDVSHEDPEVKFNWYVDGVEVHNAKTKPREEQYASTYRVVSVLTVLHQDWLNGKEYKCKVSNKALPAPIEKTISKAKGQPREPQVYTLPPCRDELTKNQVSLWCLVKGFYPSDIAVEWESNGQPENNYKTTPPVLDSDGSFFLYSKLTVDKSRWQQGNVFSCSVMHEALHNHYTQKSLSLSPGGGPGGPRAAAVKSPSGPAPTSSSTKKTQLQLEHLLLDLQMILNGINNYKNPKLTAMLTAKFAMPKKATELKHLQCLEEALKPLEEVLNLAQSKNFHLRPRDLISNINVIVLELKGSETTFMCEYADETATIVEFLNRWITFAQSIISTLT

SEQ ID NO: 97 - protein, 374 aa, Artificial Sequence
  Polypeptide chain
DKTHTCPPCPAPELLGGPSVFLFPPKPKDTLMISRTPEVTCVVVDVSHEDPEVKFNWYVDGVEVHNAKTKPREEQYASTYRVVSVLTVLHQDWLNGKEYKCKVSNKALPAPIEKTISKAKGQPREPQVYTLPPCRDELTKNQVSLWCLVKGFYPSDIAVEWESNGQPENNYKTTPPVLDSDGSFFLYSKLTVDKSRWQQGNVFSCSVMHEALHNHYTQKSLSLSPGGGSGRAAAVKSPSGPAPTSSSTKKTQLQLEHLLLDLQMILNGINNYKNPKLTRMLTFKFYMPKKATELKHLQCLEEELKPLEEVLNLAQSKNFHLRPRDLISNINVIVLELKGSETTFMCEYADETATIVEFLNRWITFAQSIISTLT

SEQ ID NO: 98 - protein, 376 aa, Artificial Sequence; identical to SEQ ID NO: 51
  Polypeptide chain

SEQ ID NO: 99 - protein, 376 aa, Artificial Sequence
  Polypeptide chain
DKTHTCPPCPAPELLGGPSVFLFPPKPKDTLMISRTPEVTCVVVDVSHEDPEVKFNWYVDGVEVHNAKTKPREEQYASTYRVVSVLTVLHQDWLNGKEYKCKVSNKALPAPIEKTISKAKGQPREPQVYTLPPCRDELTKNQVSLWCLVKGFYPSDIAVEWESNGQPENNYKTTPPVLDSDGSFFLYSKLTVDKSRWQQGNVFSCSVMHEALHNHYTQKSLSLSPGGGSSPPMPYDLYHPSGPAPTSSSTKKTQLQLEHLLLDLQMILNGINNYKNPKLTRMLTFKFYMPKKATELKHLQCLEERLKPLEEVLNLAQSKNFHLRPRDLISNINVIVLELKGSETTFMCEYADETATIVEFLNRWITFAQSIISTLT

SEQ ID NO: 100 - protein, 376 aa, Artificial Sequence
  Polypeptide chain
DKTHTCPPCPAPELLGGPSVFLFPPKPKDTLMISRTPEVTCVVVDVSHEDPEVKFNWYVDGVEVHNAKTKPREEQYASTYRVVSVLTVLHQDWLNGKEYKCKVSNKALPAPIEKTISKAKGQPREPQVYTLPPCRDELTKNQVSLWCLVKGFYPSDIAVEWESNGQPENNYKTTPPVLDSDGSFFLYSKLTVDKSRWQQGNVFSCSVMHEALHNHYTQKSLSLSPGGGSSPPMPYDLYHPSGPAPTSSSTKKTQLQLEHLLLDLQMILNGINNYKNPKLTRMLTEKFYMPKKATELKHLQCLEEELKPLEEVLNLAQSKNFHLRPRDLISNINVIVLELKGSETTFMCEYADETATIVEFLNRWITFAQSIISTLT

SEQ ID NO: 101 - protein, 376 aa, Artificial Sequence
  Polypeptide chain
DKTHTCPPCPAPELLGGPSVFLFPPKPKDTLMISRTPEVTCVVVDVSHEDPEVKFNWYVDGVEVHNAKTKPREEQYASTYRVVSVLTVLHQDWLNGKEYKCKVSNKALPAPIEKTISKAKGQPREPQVYTLPPCRDELTKNQVSLWCLVKGFYPSDIAVEWESNGQPENNYKTTPPVLDSDGSFFLYSKLTVDKSRWQQGNVFSCSVMHEALHNHYTQKSLSLSPGGGSSPPMPYDLYHPSGPAPTSSSTKKTQLQLEHLLLDLQMILNGINNYKNPKLTRMLTFKFYMPKKATELKHLQCLEESLKPLEEVLNLAQSKNFHLRPRDLISNINVIVLELKGSETTFMCEYADETATIVEFLNRWITFAQSIISTLT

SEQ ID NO: 102 - protein, 376 aa, Artificial Sequence
  Polypeptide chain
DKTHTCPPCPAPELLGGPSVFLFPPKPKDTLMISRTPEVTCVVVDVSHEDPEVKFNWYVDGVEVHNAKTKPREEQYASTYRVVSVLTVLHQDWLNGKEYKCKVSNKALPAPIEKTISKAKGQPREPQVYTLPPCRDELTKNQVSLWCLVKGFYPSDIAVEWESNGQPENNYKTTPPVLDSDGSFFLYSKLTVDKSRWQQGNVFSCSVMHEALHNHYTQKSLSLSPGGGSSPPMPYDLYHPSGPAPTSSSTKKTQLQLEHLLLDLQMILNGINNYKNPKLTRMLTAKFYMPKKATELKHLQCLEEELKPLEEVLNLAQSKNFHLRPRDLISNINVIVLELKGSETTFMCEYADETATIVEFLNRWITFAQSIISTLT

SEQ ID NO: 103 - protein, 376 aa, Artificial Sequence
  Polypeptide chain
DKTHTCPPCPAPELLGGPSVFLFPPKPKDTLMISRTPEVTCVVVDVSHEDPEVKFNWYVDGVEVHNAKTKPREEQYASTYRVVSVLTVLHQDWLNGKEYKCKVSNKALPAPIEKTISKAKGQPREPQVYTLPPCRDELTKNQVSLWCLVKGFYPSDIAVEWESNGQPENNYKTTPPVLDSDGSFFLYSKLTVDKSRWQQGNVFSCSVMHEALHNHYTQKSLSLSPGGGSSPPMPYDLYHPSGPAPTSSSTKKTQLQLEHLLLDLQMILNGINNYKNPKLTRMLTFKFRMPKKATELKHLQCLEEELKPLEEVLNLAQSKNFHLRPRDLISNINVIVLELKGSETTFMCEYADETATIVEFLNRWITFAQSIISTLT

SEQ ID NO: 104 - protein, 376 aa, Artificial Sequence
  Polypeptide chain
DKTHTCPPCPAPELLGGPSVFLFPPKPKDTLMISRTPEVTCVVVDVSHEDPEVKFNWYVDGVEVHNAKTKPREEQYASTYRVVSVLTVLHQDWLNGKEYKCKVSNKALPAPIEKTISKAKGQPREPQVYTLPPCRDELTKNQVSLWCLVKGFYPSDIAVEWESNGQPENNYKTTPPVLDSDGSFFLYSKLTVDKSRWQQGNVFSCSVMHEALHNHYTQKSLSLSPGGGSSPPMPYDLYHPSGPAPTSSSTKKTQLQLEHLLLDLQMILNGINNYKNPKLTRMLTSKFYMPKKATELKHLQCLFFSLKPLFEVLNLAQSKNFHLRPRDLISNINVIVLELKGSFTTFMCEYADETATIVEFLNRWITFAQSIISTLT

SEQ ID NO: 105 - protein, 372 aa, Artificial Sequence
  Polypeptide chain
DKTHTCPPCPAPELLGGPSVFLFPPKPKDTLMISRTPEVTCVVVDVSHEDPEVKFNWYVDGVEVHNAKTKPREEQYASTYRVVSVLTVLHQDWLNGKEYKCKVSNKALPAPIEKTISKAKGQPREPQVYTLPPCRDELTKNQVSLWCLVKGFYPSDIAVEWESNGQPENNYKTTPPVLDSDGSFFLYSKLTVDKSRWQQGNVFSCSVMHEALHNHYTQKSLSLSPGGSPGVPLSLYSGPAPTSSSTKKTQLQLEHLLLDLQMILNGINNYKNPKLTRMLTFKFYMPKKATELKHLQCLEERLKPLEEVLNLAQSKNFHLRPRDLISNINVIVLELKGSETTFMCEYADETATIVEFLNRWITFAQSIISTLT

SEQ ID NO: 106 - protein, 372 aa, Artificial Sequence
  Polypeptide chain
DKTHTCPPCPAPELLGGPSVFLFPPKPKDTLMISRTPEVTCVVVDVSHEDPEVKFNWYVDGVEVHNAKTKPREEQYASTYRVVSVLTVLHQDWLNGKEYKCKVSNKALPAPIEKTISKAKGQPREPQVYTLPPCRDELTKNQVSLWCLVKGFYPSDIAVEWESNGQPENNYKTTPPVLDSDGSFFLYSKLTVDKSRWQQGNVFSCSVMHEALHNHYTQKSLSLSPGGSPGVPLSLYSGPAPTSSSTKKTQLQLEHLLLDLQMILNGINNYKNPKLTRMLTEKFYMPKKATELKHLQCLEEELKPLEEVLNLAQSKNFHLRPRDLISNINVIVLELKGSETTFMCEYADETATIVEFLNRWITFAQSIISTLT

SEQ ID NO: 107 - protein, 372 aa, Artificial Sequence
  Polypeptide chain
DKTHTCPPCPAPELLGGPSVFLFPPKPKDTLMISRTPEVTCVVVDVSHEDPEVKFNWYVDGVEVHNAKTKPREEQYASTYRVVSVLTVLHQDWLNGKEYKCKVSNKALPAPIEKTISKAKGQPREPQVYTLPPCRDELTKNQVSLWCLVKGFYPSDIAVEWESNGQPENNYKTTPPVLDSDGSFFLYSKLTVDKSRWQQGNVFSCSVMHEALHNHYTQKSLSLSPGGSPGVPLSLYSGPAPTSSSTKKTQLQLEHLLLDLQMILNGINNYKNPKLTRMLTFKFYMPKKATELKHLQCLEESLKPLEEVLNLAQSKNFHLRPRDLISNINVIVLELKGSETTFMCEYADETATIVEFLNRWITFAQSIISTLT

SEQ ID NO: 108 - protein, 372 aa, Artificial Sequence
  Polypeptide chain
DKTHTCPPCPAPELLGGPSVFLFPPKPKDTLMISRTPEVTCVVVDVSHEDPEVKFNWYVDGVEVHNAKTKPREEQYASTYRVVSVLTVLHQDWLNGKEYKCKVSNKALPAPIEKTISKAKGQPREPQVYTLPPCRDELTKNQVSLWCLVKGFYPSDIAVEWESNGQPENNYKTTPPVLDSDGSFFLYSKLTVDKSRWQQGNVFSCSVMHEALHNHYTQKSLSLSPGGSPGVPLSLYSGPAPTSSSTKKTQLQLEHLLLDLQMILNGINNYKNPKLTRMLTAKFYMPKKATELKHLQCLEEELKPLEEVLNLAQSKNFHLRPRDLISNINVIVLELKGSETTFMCEYADETATIVEFLNRWITFAQSIISTLT

SEQ ID NO: 109 - protein, 372 aa, Artificial Sequence
  Polypeptide chain
DKTHTCPPCPAPELLGGPSVFLFPPKPKDTLMISRTPEVTCVVVDVSHEDPEVKFNWYVDGVEVHNAKTKPREEQYASTYRVVSVLTVLHQDWLNGKEYKCKVSNKALPAPIEKTISKAKGQPREPQVYTLPPCRDELTKNQVSLWCLVKGFYPSDIAVEWESNGQPENNYKTTPPVLDSDGSFFLYSKLTVDKSRWQQGNVFSCSVMHEALHNHYTQKSLSLSPGGSPGVPLSLYSGPAPTSSSTKKTQLQLEHLLLDLQMILNGINNYKNPKLTRMLTFKFRMPKKATELKHLQCLEEELKPLEEVLNLAQSKNFHLRPRDLISNINVIVLELKGSETTFMCEYADETATIVEFLNRWITFAQSIISTLT

SEQ ID NO: 110 - protein, 372 aa, Artificial Sequence
  Polypeptide chain
DKTHTCPPCPAPELLGGPSVFLFPPKPKDTLMISRTPEVTCVVVDVSHEDPEVKFNWYVDGVEVHNAKTKPREEQYASTYRVVSVLTVLHQDWLNGKEYKCKVSNKALPAPIEKTISKAKGQPREPQVYTLPPCRDELTKNQVSLWCLVKGFYPSDIAVEWESNGQPENNYKTTPPVLDSDGSFFLYSKLTVDKSRWQQGNVFSCSVMHEALHNHYTQKSLSLSPGGSPGVPLSLYSGPAPTSSSTKKTQLQLEHLLLDLQMILNGINNYKNPKLTRMLTSKFYMPKKATELKHLQCLEESLKPLEEVLNLAQSKNFHLRPRDLISNINVIVLELKGSETTFMCEYADETATFVEFLNRWITFAQSIISTLT

SEQ ID NO: 111 - protein, 372 aa, Artificial Sequence
  Polypeptide chain
DKTHTCPPCPAPELLGGPSVFLFPPKPKDTLMISRTPEVTCVVVDVSHEDPEVKFNWYVDGVEVHNAKTKPREEQYASTYRVVSVLTVLHQDWLNGKEYKCKVSNKALPAPIEKTISKAKGQPREPQVYTLPPCRDELTKNQVSLWCLVKGFYPSDIAVEWESNGQPENNYKTTPPVLDSDGSFFLYSKLTVDKSRWQQGNVFSCSVMHEALHNHYTQKSLSLSPGGSPGVPLSLYSGPAPTSSSTKKTQLQLEHLLLDLQMILNGINNYKNPKLTRMLTFKFYMPKKATELKHLQCLEEELKPLEEVLNLAQSKNFHLRPRDLISNINVIVLELKGSETTFMCEYADETATIVEFLNRWITFAQSIISTLT

SEQ ID NO: 112 - protein, 15 aa, Artificial Sequence
  Linker
GSPDLLAVVAASSGP

SEQ ID NO: 113 - protein, 16 aa, Artificial Sequence
  Linker
GSPGDLLAVVAASSGP

SEQ ID NO: 114 - protein, 18 aa, Artificial Sequence
  Linker
GSGSPSDLLAVVAASSGP

SEQ ID NO: 115 - protein, 16 aa, Artificial Sequence
  Linker
GGPSDLLAVVAASSGP

SEQ ID NO: 116 - protein, 17 aa, Artificial Sequence
  Linker
GSGPSDLLAVVAASSGP

SEQ ID NO: 117 - protein, 18 aa, Artificial Sequence
  Linker
GSSGGPDLLAVVAASSGP

SEQ ID NO: 118 - protein, 9 aa, Artificial Sequence
  Cleavable peptide
DLLAVVAAS

SEQ ID NO: 119 - protein, 10 aa, Artificial Sequence
  Cleavable peptide
ISSGLLSGRS

SEQ ID NO: 120 - protein, 4 aa, Artificial Sequence
  Linker
GGPS

SEQ ID NO: 121 - protein, 5 aa, Artificial Sequence
  Linker
GSGPS

SEQ ID NO: 122 - protein, 6 aa, Artificial Sequence
  Linker
GSSGGP

SEQ ID NO: 123 - skipped

SEQ ID NO: 124 - protein, 6 aa, Artificial Sequence
  Linker
GSGSPS

SEQ ID NO: 125 - protein, 454 aa, Artificial Sequence
  Polypeptide chain
DKTHTCPPCPAPELLGGPSVFLFPPKPKDTLMISRTPEVTCVVVDVSHEDPEVKFNWYVDGVEVHNAKTKPREEQYASTYRVVSVLTVLHQDWLNGKEYKCKVSNKALPAPIEKTISKAKGQPREPQVCTLPPSRDELTKNQVSLSCAVKGFYPSDIAVEWESNGQPENNYKTTPPVLDSDGSFFLVSKLTVDKSRWQQGNVFSCSVMHEALHNHYTQKSLSLSPGGSPDLLAVVAASSGPAVNGTSQFTCFYNSRANISCVWSQDGALQDTSCQVHAWPDRRRWNQTCELLPVSQASWACNLILGAPDSQKLTTVDIVTLRVLCREGVRWRVMAIQDFKPFENLRLMAPISLQVVHVETHRCNISWEISQASHYFERHLEFEARTLSPGHTWEEAPLLTLKQKQEWICLETLTPDTQYEFQVRVKPLQGEFTTWSPWSQPLAFRTKPAALGKD

SEQ ID NO: 126 - protein, 455 aa, Artificial Sequence
  Polypeptide chain
DKTHTCPPCPAPELLGGPSVFLFPPKPKDTLMISRTPEVTCVVVDVSHEDPEVKFNWYVDGVEVHNAKTKPREEQYASTYRVVSVLTVLHQDWLNGKEYKCKVSNKALPAPIEKTISKAKGQPREPQVCTLPPSRDELTKNQVSLSCAVKGFYPSDIAVEWESNGQPENNYKTTPPVLDSDGSFFLVSKLTVDKSRWQQGNVFSCSVMHEALHNHYTQKSLSLSPGGSPGDLLAVVAASSGPAVNGTSQFTCFYNSRANISCVWSQDGALQDTSCQVHAWPDRRRWNQTCELLPVSQASWACNLILGAPDSQKLTTVDIVTLRVLCREGVRWRVMAIQDFKPFENLRLMAPISLQVVHVETHRCNISWEISQASHYFERHLEFEARTLSPGHTWEEAPLLTLKQKQEWICLETLTPDTQYEFQVRVKPLQGEFTTWSPWSQPLAFRTKPAALGKD

SEQ ID NO: 127 - protein, 456 aa, Artificial Sequence
  Polypeptide chain
DKTHTCPPCPAPELLGGPSVFLFPPKPKDTLMISRTPEVTCVVVDVSHEDPEVKFNWYVDGVEVHNAKTKPREEQYASTYRVVSVLTVLHQDWLNGKEYKCKVSNKALPAPIEKTISKAKGQPREPQVCTLPPSRDELTKNQVSLSCAVKGFYPSDIAVEWESNGQPENNYKTTPPVLDSDGSFFLVSKLTVDKSRWQQGNVFSCSVMHEALHNHYTQKSLSLSPGSGSPSDLLAVVAASSGPAVNGTSQFTCFYNSRANISCVWSQDGALQDTSCQVHAWPDRRRWNQTCELLPVSQASWACNLILGAPDSQKLTTVDIVTLRVLCREGVRWRVMAIQDFKPFENLRLMAPISLQVVHVETHRCNISWEISQASHYFERHLEFEARTLSPGHTWEEAPLLTLKQKQEWICLETLTPDTQYEFQVRVKPLQGEFTTWSPWSQPLAFRTKPAALGKD

SEQ ID NO: 128 - protein, 375 aa, Artificial Sequence
  Polypeptide chain
DKTHTCPPCPAPELLGGPSVFLFPPKPKDTLMISRTPEVTCVVVDVSHEDPEVKFNWYVDGVEVHNAKTKPREEQYASTYRVVSVLTVLHQDWLNGKEYKCKVSNKALPAPIEKTISKAKGQPREPQVYTLPPCRDELTKNQVSLWCLVKGFYPSDIAVEWESNGQPENNYKTTPPVLDSDGSFFLYSKLTVDKSRWQQGNVFSCSVMHEALHNHYTQKSLSLSPGGGPSDLLAVVAASSGPAPTSSSTKKTQLQLEHLLLDLQMILNGINNYKNPKLTAMLTAKFAMPKKATELKHLQCLEEALKPLEEVLNLAQSKNFHLRPRDLISNINVIVLELKGSETTFMCEYADETATIVEFLNRWITFAQSIISTLT

SEQ ID NO: 129 - protein, 376 aa, Artificial Sequence
  Polypeptide chain
DKTHTCPPCPAPELLGGPSVFLFPPKPKDTLMISRTPEVTCVVVDVSHEDPEVKFNWYVDGVEVHNAKTKPREEQYASTYRVVSVLTVLHQDWLNGKEYKCKVSNKALPAPIEKTISKAKGQPREPQVYTLPPCRDELTKNQVSLWCLVKGFYPSDIAVEWESNGQPENNYKTTPPVLDSDGSFFLYSKLTVDKSRWQQGNVFSCSVMHEALHNHYTQKSLSLSPGGSGPSDLLAVVAASSGPAPTSSSTKKTQLQLEHLLLDLQMILNGINNYKNPKLTAMLTAKFAMPKKATELKHLQCLEEALKPLEEVLNLAQSKNFHLRPRDLISNINVIVLELKGSETTFMCEYADETATIVEFLNRWITFAQSIISTLT

SEQ ID NO: 130 - protein, 377 aa, Artificial Sequence
  Polypeptide chain
DKTHTCPPCPAPELLGGPSVFLFPPKPKDTLMISRTPEVTCVVVDVSHEDPEVKFNWYVDGVEVHNAKTKPREEQYASTYRVVSVLTVLHQDWLNGKEYKCKVSNKALPAPIEKTISKAKGQPREPQVYTLPPCRDELTKNQVSLWCLVKGFYPSDIAVEWESNGQPENNYKTTPPVLDSDGSFFLYSKLTVDKSRWQQGNVFSCSVMHEALHNHYTQKSLSLSPGGSSGGPDLLAVVAASSGPAPTSSSTKKTQLQLEHLLLDLQMILNGINNYKNPKLTAMLTAKFAMPKKATELKHLQCLEEALKPLEEVLNLAQSKNFHLRPRDLISNINVIVLELKGSETTFMCEYADETATIVEFLNRWITFAQSIISTLT

SEQ ID NO: 131 - protein, 376 aa, Artificial Sequence; identical to SEQ ID NO: 51
  Cleavage product

SEQ ID NO: 132 - protein, 239 aa, Artificial Sequence
  Cleavage product
DKTHTCPPCPAPELLGGPSVFLFPPKPKDTLMISRTPEVTCVVVDVSHEDPEVKFNWYVDGVEVHNAKTKPREEQYASTYRVVSVLTVLHQDWLNGKEYKCKVSNKALPAPIEKTISKAKGQPREPQVCTLPPSRDELTKNQVSLSCAVKGFYPSDIAVEWESNGQPENNYKTTPPVLDSDGSFFLVSKLTVDKSRWQQGNVFSCSVMHEALHNHYTQKSLSLSPGGPPSGSSPGDSGG

SEQ ID NO: 133 - protein, 376 aa, Artificial Sequence; identical to SEQ ID NO: 51
  Cleavage product

SEQ ID NO: 134 - protein, 239 aa, Artificial Sequence
  Cleavage product
DKTHTCPPCPAPELLGGPSVFLFPPKPKDTLMISRTPEVTCVVVDVSHEDPEVKFNWYVDGVEVHNAKTKPREEQYASTYRVVSVLTVLHQDWLNGKEYKCKVSNKALPAPIEKTISKAKGQPREPQVCTLPPSRDELTKNQVSLSCAVKGFYPSDIAVEWESNGQPENNYKTTPPVLDSDGSFFLVSKLTVDKSRWQQGNVFSCSVMHEALHNHYTQKSLSLSPGGPPSGSSPGVPLS

SEQ ID NO: 135 - protein, 376 aa, Artificial Sequence; identical to SEQ ID NO: 51
  Cleavage product

SEQ ID NO: 136 - protein, 238 aa, Artificial Sequence
  Cleavage product
DKTHTCPPCPAPELLGGPSVFLFPPKPKDTLMISRTPEVTCVVVDVSHEDPEVKFNWYVDGVEVHNAKTKPREEQYASTYRVVSVLTVLHQDWLNGKEYKCKVSNKALPAPIEKTISKAKGQPREPQVCTLPPSRDELTKNQVSLSCAVKGFYPSDIAVEWESNGQPENNYKTTPPVLDSDGSFFLVSKLTVDKSRWQQGNVFSCSVMHEALHNHYTQKSLSLSPGGPPSGSSPMPYD

SEQ ID NO: 137 - protein, 141 aa, Artificial Sequence
  Cleavage product
VVAASSGPAPTSSSTKKTQLQLEHLLLDLQMILNGINNYKNPKLTAMLTAKFAMPKKATELKHLQCLEEALKPLEEVLNLAQSKNFHLRPRDLISNINVIVLELKGSETTFMCEYADETATIVEFLNRWITFAQSIISTLT

SEQ ID NO: 138 - protein, 376 aa, Artificial Sequence; identical to SEQ ID NO: 51
  Cleavage product

SEQ ID NO: 139 - protein, 233 aa, Artificial Sequence
  Cleavage product
DKTHTCPPCPAPELLGGPSVFLFPPKPKDTLMISRTPEVTCVVVDVSHEDPEVKFNWYVDGVEVHNAKTKPREEQYASTYRVVSVLTVLHQDWLNGKEYKCKVSNKALPAPIEKTISKAKGQPREPQVCTLPPSRDELTKNQVSLSCAVKGFYPSDIAVEWESNGQPENNYKTTPPVLDSDGSFFLVSKLTVDKSRWQQGNVFSCSVMHEALHNHYTQKSLSLSPGGSPDLLA

SEQ ID NO: 140 - protein, 376 aa, Artificial Sequence; identical to SEQ ID NO: 51
  Cleavage product

SEQ ID NO: 141 - protein, 234 aa, Artificial Sequence
  Cleavage product
DKTHTCPPCPAPELLGGPSVFLFPPKPKDTLMISRTPEVTCVVVDVSHEDPEVKFNWYVDGVEVHNAKTKPREEQYASTYRVVSVLTVLHQDWLNGKEYKCKVSNKALPAPIEKTISKAKGQPREPQVCTLPPSRDELTKNQVSLSCAVKGFYPSDIAVEWESNGQPENNYKTTPPVLDSDGSFFLVSKLTVDKSRWQQGNVFSCSVMHEALHNHYTQKSLSLSPGGSPGDLLA

SEQ ID NO: 142 - protein, 376 aa, Artificial Sequence; identical to SEQ ID NO: 51
  Cleavage product

SEQ ID NO: 143 - protein, 236 aa, Artificial Sequence
  Cleavage product
DKTHTCPPCPAPELLGGPSVFLFPPKPKDTLMISRTPEVTCVVVDVSHEDPEVKFNWYVDGVEVHNAKTKPREEQYASTYRVVSVLTVLHQDWLNGKEYKCKVSNKALPAPIEKTISKAKGQPREPQVCTLPPSRDELTKNQVSLSCAVKGFYPSDIAVEWESNGQPENNYKTTPPVLDSDGSFFLVSKLTVDKSRWQQGNVFSCSVMHEALHNHYTQKSLSLSPGGSGSPSDLLA

SEQ ID NO: 144 - protein, 226 aa, Artificial Sequence; identical to SEQ ID NO: 9
  Fc

SEQ ID NO: 145 - protein, 226 aa, Artificial Sequence; identical to SEQ ID NO: 12
  Fc

SEQ ID NO: 146 - protein, 227 aa, Artificial Sequence
  Fc
TIKPCPPCKCPAPNAAGGPSVFIFPPKIKDVLMISLSPIVTCVVVDVSEDDPDVQISWFVNNVEVHTAQTQTHREDYNSTLRVVSALPIQHQDWMSGKEFKCKVNNKDLGAPIERTISKPKGSVRAPQVYVLPPCEEEMTKKQVTLWCMVTDFMPEDIYVEWTNNGKTELNYKNTEPVLDSDGSYFMYSKLRVEKKNWVERNSYSCSVVHEGLHNHHTTKSFSRTPG

SEQ ID NO: 147 - protein, 227 aa, Artificial Sequence
  Fc
TIKPCPPCKCPAPNAAGGPSVFIFPPKIKDVLMISLSPIVTCVVVDVSEDDPDVQISWFVNNVEVHTAQTQTHREDYNSTLRVVSALPIQHQDWMSGKEFKCKVNNKDLGAPIERTISKPKGSVRAPQVCVLPPPEEEMTKKQVTLSCAVTDFMPEDIYVEWTNNGKTELNYKNTEPVLDSDGSYFMVSKLRVEKKNWVERNSYSCSVVHEGLHNHHTTKSFSRTPG

SEQ ID NO: 148 - protein, 243 aa, Artificial Sequence
  Fc
EVQLLESGGGLVQPGGSLRLSCAASGFTFSLFTMSVVVRQAPGKGLEVVVSAISGSGGSTYYADSVKGRFTISRDNSKNTLYLQMNSLRAEDTAVYYCAKSTHLYLFDYWGQGTLVTVSSGGGGSGGGGSGGGGSEIVLTQSPGTLSLSPGERATLSCRASQSVSMPFLAWYQQKPGQAPRLLIYGASSRATGIPDRFSGSGSGTDFTLTISRLEPEDFAVYYCQQMRGRPPTFGQGTKVEIK

SEQ ID NO: 149 - protein, 224 aa, Artificial Sequence
  Fc
VRSGCKPCICTVPEVSSVFIFPPKPKDVLTITLTPKVTCVVVAISKDDPEVQFSWFVDDVEVHTAQTQPREEQFNSTFRSVSELPIMHQDWLNGKEFKCRVNSAAFGAPIEKTISKTKGRPKAPQVYTIPPPKEQMAKDKVSLTCMITDFFPEDITVEWQWNGQPAENYDNTQPIMDTDGSYFVYSDLNVQKSNWEAGNTFTCSVLHEGLHNHHTEKSLSHSPG

SEQ ID NO: 150 - protein, 224 aa, Artificial Sequence
  Fc
VRSGCKPCICTVPEVSSVFIFPPKPKDVLTITLTPKVTCVVVAISKDDPEVQFSWFVDDVEVHTAQTQPREEQFNSTFRSVSELPIMHQDWLNGKEFKCRVNSAAFGAPIEKTISKTKGRPKAPQVYTIPPPKKQMAKDKVSLTCMITDFFPEDITVEWQWNGQPAENYKNTQPIMKTDGSYFVYSKLNVQKSNWEAGNTFTCSVLHEGLHNHHTEKSLSHSPG

SEQ ID NO: 151 - protein, 231 aa, Artificial Sequence
  Fc
EPKSSDKTHTCPPCPAPELLGGPSVFLFPPKPKDTLMISRTPEVTCVVVDVSHEDPEVKFNWYVDGVEVHNAKTKPREEQYASTYRVVSVLTVLHQDWLNGKEYKCKVSNKALPAPIEKTISKAKGQPREPQVCTLPPSRDELTKNQVSLSCAVKGFYPSDIAVEWESNGQPENNYKTTPPVLDSDGSFFLVSKLTVDKSRWQQGNVFSCSVMHEALHNHYTQKSLSLSPG

SEQ ID NO: 152 - protein, 229 aa, Artificial Sequence
  Fc
AKTDKTHTCPPCPAPELLGGPSVFLFPPKPKDTLMISRTPEVTCVVVDVSHEDPEVKFNWYVDGVEVHNAKTKPREEQYASTYRVVSVLTVLHQDWLNGKEYKCKVSNKALPAPIEKTISKAKGQPREPQVCTLPPSRDELTKNQVSLSCAVKGFYPSDIAVEWESNGQPENNYKTTPPVLDSDGSFFLVSKLTVDKSRWQQGNVFSCSVMHEALHNHYTQKSLSLSPG

SEQ ID NO: 153 - protein, 234 aa, Artificial Sequence
  Fc
AKTEPKSSDKTHTCPPCPAPELLGGPSVFLFPPKPKDTLMISRTPEVTCVVVDVSHEDPEVKFNWYVDGVEVHNAKTKPREEQYASTYRVVSVLTVLHQDWLNGKEYKCKVSNKALPAPIEKTISKAKGQPREPQVCTLPPSRDELTKNQVSLSCAVKGFYPSDIAVEWESNGQPENNYKTTPPVLDSDGSFFLVSKLTVDKSRWQQGNVFSCSVMHEALHNHYTQKSLSLSPG

SEQ ID NO: 154 - protein, 231 aa, Artificial Sequence
  Fc
EPKSSDKTHTCPPCPAPELLGGPSVFLFPPKPKDTLMISRTPEVTCVVVDVSHEDPEVKFNWYVDGVEVHNAKTKPREEQYASTYRVVSVLTVLHQDWLNGKEYKCKVSNKALPAPIEKTISKAKGQPREPQVYTLPPCRDELTKNQVSLWCLVKGFYPSDIAVEWESNGQPENNYKTTPPVLDSDGSFFLYSKLTVDKSRWQQGNVFSCSVMHEALHNHYTQKSLSLSPG

SEQ ID NO: 155 - protein, 229 aa, Artificial Sequence
  Fc
AKTDKTHTCPPCPAPELLGGPSVFLFPPKPKDTLMISRTPEVTCVVVDVSHEDPEVKFNWYVDGVEVHNAKTKPREEQYASTYRVVSVLTVLHQDWLNGKEYKCKVSNKALPAPIEKTISKAKGQPREPQVYTLPPCRDELTKNQVSLWCLVKGFYPSDIAVEWESNGQPENNYKTTPPVLDSDGSFFLYSKLTVDKSRWQQGNVFSCSVMHEALHNHYTQKSLSLSPG

SEQ ID NO: 156 - protein, 234 aa, Artificial Sequence
  Fc
AKTEPKSSDKTHTCPPCPAPELLGGPSVFLFPPKPKDTLMISRTPEVTCVVVDVSHEDPEVKFNWYVDGVEVHNAKTKPREEQYASTYRVVSVLTVLHQDWLNGKEYKCKVSNKALPAPIEKTISKAKGQPREPQVYTLPPCRDELTKNQVSLWCLVKGFYPSDIAVEWESNGQPENNYKTTPPVLDSDGSFFLYSKLTVDKSRWQQGNVFSCSVMHEALHNHYTQKSLSLSPG

SEQ ID NO: 157 - protein, 226 aa, Artificial Sequence; identical to SEQ ID NO: 10
  Fc

SEQ ID NO: 158 - protein, 226 aa, Artificial Sequence
  Fc
DKTHTCPPCPAPELLGGPSVFLFPPKPKDTLYITREPEVTCVVVDVSHEDPEVKFNWYVDGVEVHNAKTKPREEQYASTYRVVSVLTVLHQDWLNGKEYKCKVSNKALPAPIEKTISKAKGQPREPQVCTLPPSRDELTKNQVSLSCAVKGFYPSDIAVEWESNGQPENNYKTTPPVLDSDGSFFLVSKLTVDKSRWQQGNVFSCSVMHEALHNHYTQKSLSLSPG

SEQ ID NO: 159 - protein, 226 aa, Artificial Sequence; identical to SEQ ID NO: 13
  Fc

SEQ ID NO: 160 - protein, 226 aa, Artificial Sequence
  Fc
DKTHTCPPCPAPELLGGPSVFLFPPKPKDTLYITREPEVTCVVVDVSHEDPEVKFNWYVDGVEVHNAKTKPREEQYASTYRVVSVLTVLHQDWLNGKEYKCKVSNKALPAPIEKTISKAKGQPREPQVYTLPPCRDELTKNQVSLWCLVKGFYPSDIAVEWESNGQPENNYKTTPPVLDSDGSFFLYSKLTVDKSRWQQGNVFSCSVMHEALHNHYTQKSLSLSPG

SEQ ID NO: 161 - protein, 228 aa, Artificial Sequence
  Fc
ESKYGPPCPPCPAPEFLGGPSVFLFPPKPKDTLMISRTPEVTCVVVDVSQEDPEVQFNWYVDGVEVHNAKTKPREEQFNSTYRVVSVLTVLHQDWLNGKEYKCKVSNKGLPSSIEKTISKAKGQPREPQVCTLPPSQEEMTKNQVSLSCAVKGFYPSDIAVEWESNGQPENNYKTTPPVLDSDGSFFLYSRLTVDKSRWQEGNVFSCSVMHEALHNHYTQKSLSLSLG

SEQ ID NO: 162 - protein, 228 aa, Artificial Sequence
  Fc
ESKYGPPCPPCPAPEFLGGPSVFLFPPKPKDTLMISRTPEVTCVVVDVSQEDPEVQFNWYVDGVEVHNAKTKPREEQFNSTYRVVSVLTVLHQDWLNGKEYKCKVSNKGLPSSIEKTISKAKGQPREPQVYTLPPCQEEMTKNQVSLWCLVKGFYPSDIAVEWESNGQPENNYKTTPPVLDSDGSFFLYSRLTVDKSRWQEGNVFSCSVMHEALHNHYTQKSLSLSLG

SEQ ID NO: 163 - protein, 230 aa, Artificial Sequence
  Fc
ESKYGPPCPPCPAPEFLGGPSVFLFPPKPKDTLMISRTPEVTCVVVDVSQEDPEVQFNWYVDGVEVHNAKTKPREEQFNSTYRVVSVLTVLHQDWLNGKEYKCKVSNKGLPSSIEKTISKAKGQPREPQVCTLPPSQEEMTKNQVSLSCAVKGFYPSDIAVEWESNGQPENNYKTTPPVLDSDGSFFLYSRLTVDKSRWQEGNVFSCSVMHEALHNHYTQKSLSLSLGGP

SEQ ID NO: 164 - protein, 230 aa, Artificial Sequence
  Fc
ESKYGPPCPPCPAPEFLGGPSVFLFPPKPKDTLMISRTPEVTCVVVDVSQEDPEVQFNWYVDGVEVHNAKTKPREEQFNSTYRVVSVLTVLHQDWLNGKEYKCKVSNKGLPSSIEKTISKAKGQPREPQVCTLPPSQEEMTKNQVSLSCAVKGFYPSDIAVEWESNGQPENNYKTTPPVLDSDGSFFLYSRLTVDKSRWQEGNVFSCSVMHEALHNHYTQKSLSLSLGPG

SEQ ID NO: 165 - protein, 226 aa, Artificial Sequence; identical to SEQ ID NO: 8
  Fc

SEQ ID NO: 166 - protein, 226 aa, Artificial Sequence
  Fc
DKTHTCPPCPAPELLGGPSVFLFPPKPKDTLMISRTPEVTCVVVDVSHEDPEVKFNWYVDGVEVHNAKTKPREEQYNSTYRVVSVLTVLHQDWLNGKEYKCKVSNKALPAPIEKTISKAKGQPREPQVYTLPPCRDELTKNQVSLWCLVKGFYPSDIAVEWESNGQPENNYKTTPPVLDSDGSFFLYSKLTVDKSRWQQGNVFSCSVMHEALHNHYTQKSLSLSPG

SEQ ID NO: 167 - protein, 226 aa, Artificial Sequence
  Fc
DKTHTCPPCPAPELLGGPSVFLFPPKPKDTLMIARTPEVTCVVVDVSHEDPEVKFNWYVDGVEVHNAKTKPREEQYASTYRVVSVLTVLHQDWLNGKEYKCKVSNKALPAPIEKTISKAKGQPREPQVYTLPPCRDELTKNQVSLWCLVKGFYPSDIAVEWESNGQPENNYKTTPPVLDSDGSFFLYSKLTVDKSRWQQGNVFSCSVMHEALHNHYTQKSLSLSPG

SEQ ID NO: 168 - protein, 5 aa, Artificial Sequence
  Linker
PGSGS

SEQ ID NO: 169 - protein, 17 aa, Artificial Sequence
  Linker
GGSSPPGGGSSGGGSGP

SEQ ID NO: 170 - protein, 4 aa, Artificial Sequence
  Linker
GSPG

SEQ ID NO: 171 - protein, 4 aa, Artificial Sequence
  Linker
GSGP

SEQ ID NO: 172-173 - skipped (2 entries)

SEQ ID NO: 174 - protein, 8 aa, Artificial Sequence
  Linker
HHHHHHHH

SEQ ID NO: 175 - protein, 17 aa, Artificial Sequence
  Linker
GISSGLLSGRSDQPSGP

SEQ ID NO: 176 - protein, 9 aa, Artificial Sequence
  Linker
GPPSGSSPG

SEQ ID NO: 177 - protein, 14 aa, Artificial Sequence
  Linker
GISSGLLSGRSSGP

SEQ ID NO: 178 - protein, 8 aa, Artificial Sequence
  Linker
GPPSGSSP

SEQ ID NO: 179 - protein, 7 aa, Artificial Sequence
  Linker
PSGSSPG

SEQ ID NO: 180 - protein, 6 aa, Artificial Sequence
  Linker
GGSSPP

SEQ ID NO: 181 - protein, 4 aa, Artificial Sequence
  Linker
GGPS

SEQ ID NO: 182 - protein, 5 aa, Artificial Sequence
  Linker
GSGPS

SEQ ID NO: 183 - protein, 6 aa, Artificial Sequence
  Linker
GSSGGP

SEQ ID NO: 184 - skipped

SEQ ID NO: 185 - protein, 5 aa, Artificial Sequence
  Linker
SGSPS

SEQ ID NO: 186 - protein, 213 aa, Artificial Sequence; identical to SEQ ID NO: 4
  Masking moiety

SEQ ID NO: 187 - protein, 133 aa, Artificial Sequence; identical to SEQ ID NO: 3
  Cytokine

SEQ ID NO: 188 - protein, 6 aa, Artificial Sequence
  Cleavable peptide
VPLSLY

SEQ ID NO: 189 - protein, 8 aa, Artificial Sequence
  Cleavable peptide
DSGGFMLT

SEQ ID NO: 190 - protein, 213 aa, Artificial Sequence; identical to SEQ ID NO: 5
  Masking moiety

SEQ ID NO: 191 - protein, 18 aa, Artificial Sequence
  Cleavable peptide
NPMGSDPVNFKLLRVVNG

SEQ ID NO: 192 - protein, 214 aa, Artificial Sequence
  Masking moiety
AVKNCSHLECFYNSRANVSCMWSHEEALNVTTCHVHAKSNLRHWNKTCELTLVRQASWACNLILGSFPESQSLTSVDLLDINVVCWEEKGWRRVKTCDFHPFDNLRLVAPHSLQVLHIDTQRCNISWKVSQVSHYIEPYLEFEARRRLLGHSWEDASVLSLKQRQQWLFLEMLIPSTSYEVQVRVKAQRNNTGTWSPWSQPLTFRTRPADPMKE

SEQ ID NO: 193 - protein, 213 aa, Artificial Sequence
  Masking moiety
AVNGTSQFTCFYNSRANISCVWSQDGALQDTSCQVHAWPDRRRWNQTCELLPVSQASWACNLILGAPDSQKLTTVDIVTLRVLCREGVRWRVMAIQDFKPFENLRLMAPISLQVVHVETHRCNISWEISQASHYFERHLEFEARTLSPGHTWEEAPLLTLKQKQEWISLETLTPDTQYEFQVRVKPLQGEFTTWSPWSQPLAFRTKPAALGKD

SEQ ID NO: 194 - protein, 133 aa, Artificial Sequence
  Cytokine
APTSSSTKKTQLQLEHLLLDLQMILNGINNYKNPKLTAMLTAKFAMPKKATELKHLQCLEEALKPLEEVLNLAQSKNFHFDPRDVVSNINVFVLELKGSETTFMCEYADETATIVEFLNRWITFAQSIISTLT

SEQ ID NO: 195 - protein, 8 aa, Artificial Sequence
  Cleavable peptide
RAAAVKSP

SEQ ID NO: 196 - protein, 8 aa, Artificial Sequence
  Cleavable peptide
MPYDLYHP

SEQ ID NO: 197 - protein, 9 aa, Artificial Sequence
  Cleavable peptide
DLLAVVAAS

SEQ ID NO: 198-199 - skipped (2 entries)

SEQ ID NO: 200 - protein, 9 aa, Artificial Sequence
  Linker
GHHHHHHHH

SEQ ID NO: 201 - protein, 5 aa, Artificial Sequence
  Linker
GSGGG

SEQ ID NO: 202 - protein, 4 aa, Artificial Sequence
  Linker
SGGG

SEQ ID NO: 203 - protein, 133 aa, Artificial Sequence; identical to SEQ ID NO: 62
  Cytokine

SEQ ID NO: 204 - protein, 133 aa, Artificial Sequence; identical to SEQ ID NO: 74
  Cytokine

SEQ ID NO: 205 - protein, 133 aa, Artificial Sequence
  Cytokine
APTSSSTKKTQLQLRHLCLRLQMILNGINNYKNPKLTAMLTAKFAMPKKATELKHLQCLEEALKPLEEVLNLAQSKNFHLRPRDLISNINVIVLELKGSETTFMCEYADETATIVEFLNRWITFCQSIISTLT

SEQ ID NO: 206 - protein, 133 aa, Artificial Sequence
  Cytokine
APTSSSTKKTQLQLRHLCLRLQMILNGINNYKNPKLTAMLTAKFAMPKKATELKHLQCLEEALKPLEEVLNLAQSKNFHLRPRDLISLINVIVLELKGSETTFMCEYADETATIVEFLNRWITFCQSIISTLT

SEQ ID NO: 207 - protein, 133 aa, Artificial Sequence
  Cytokine
APTSSSTKKTQLQLLHLCLRLQMILNGINNYKNPKLTAMLTAKFAMPKKATELKHLQCLEEALKPLEEVLNLAQSKNFHLRPRDLISLINVIVLELKGSETTFMCEYADETATIVEFLNRWITFCQSIISTLT

SEQ ID NO: 208 - protein, 133 aa, Artificial Sequence
  Cytokine
APTSSSTKKTQLQLRHLCLDLQMILNGINNYKNPKLTAMLTAKFAMPKKATELKHLQCLEEALKPLEEVLNLAQSKNFHLRPRDLISLINVIVLELKGSETTFMCEYADETATIVEFLNRWITFCQSIISTLT

SEQ ID NO: 209 - protein, 133 aa, Artificial Sequence
  Cytokine
APTSSSTKKTQLQLEHLCLRLQMILNGINNYKNPKLTAMLTAKFAMPKKATELKHLQCLEEALKPLEEVLNLAQSKNFHLRPRDLISLINVIVLELKGSETTFMCEYADETATIVEFLNRWITFCQSIISTLT

SEQ ID NO: 210 - protein, 133 aa, Artificial Sequence
  Cytokine
APTSSSTKKTQLQLFHLCLRLQMILNGINNYKNPKLTAMLTAKFAMPKKATELKHLQCLEEALKPLEEVLNLAQSKNFHLRPRDLISLINVIVLELKGSETTFMCEYADETATIVEFLNRWITFCQSIISTLT

SEQ ID NO: 211 - protein, 133 aa, Artificial Sequence
  Cytokine
APTSSSTKKTQLQLEHLCLDLQMILNGINNYKNPKLTAMLTAKFAMPKKATELKHLQCLEEALKPLEEVLNLAQSKNFHLRPRDLISNINVIVLELKGSETTFMCEYADETATIVEFLNRWITFCQSIISTLT

SEQ ID NO: 212 - protein, 133 aa, Artificial Sequence
  Cytokine
APTSSSTKKTQLQLEYLLLDLQMILNGINNYKNPKLTAMLTAKFAMPKKATELKHLQCLEEALKPLEEVLNLAQSKNFHLRPRDLISNINVIVLELKGSETTFMCEYADETATIVEFLNRWITFAQSIISTLT

SEQ ID NO: 213 - protein, 133 aa, Artificial Sequence
  Cytokine
APTSSSTKKTQLQLEELLLDLQMILNGINNYKNPKLTAMLTAKFAMPKKATELKHLQCLEEALKPLEEVLNLAQSKNFHLRPRDLISNINVIVLELKGSETTFMCEYADETATIVEFLNRWITFAQSIISTLT

SEQ ID NO: 214 - protein, 133 aa, Artificial Sequence
  Cytokine
APTSSSTKKTQLQLEHLLLLLQMILNGINNYKNPKLTAMLTAKFAMPKKATELKHLQCLEEALKPLEEVLNLAQSKNFHLRPRDLISNINVIVLELKGSETTFMCEYADETATIVEFLNRWITFAQSIISTLT

SEQ ID NO: 215 - protein, 133 aa, Artificial Sequence
  Cytokine
APTSSSTKKTQLQLEYLCLDLQMILNGINNYKNPKLTAMLTAKFAMPKKATELKHLQCLEEALKPLEEVLNLAQSKNFHLRPRDLISNINVIVLELKGSETTFMCEYADETATIVEFLNRWITFCQSIISTLT

SEQ ID NO: 216 - protein, 133 aa, Artificial Sequence
  Cytokine
APTSSSTKKTQLQLEELCLDLQMILNGINNYKNPKLTAMLTAKFAMPKKATELKHLQCLEEALKPLEEVLNLAQSKNFHLRPRDLISNINVIVLELKGSETTFMCEYADETATIVEFLNRWITFCQSIISTLT

SEQ ID NO: 217 - protein, 133 aa, Artificial Sequence
  Cytokine
APTSSSTKKTQLQLEHLCLLLQMILNGINNYKNPKLTAMLTAKFAMPKKATELKHLQCLEEALKPLEEVLNLAQSKNFHLRPRDLISNINVIVLELKGSETTFMCEYADETATIVEFLNRWITFCQSIISTLT

SEQ ID NO: 218 - protein, 133 aa, Artificial Sequence
  Cytokine
APTSSSTKKTQLQLEYLCLLLQMILNGINNYKNPKLTAMLTAKFAMPKKATELKHLQCLEEALKPLEEVLNLAQSKNFHLRPRDLISNINVIVLELKGSETTFMCEYADETATIVEFLNRWITFCQSIISTLT

SEQ ID NO: 219 - protein, 133 aa, Artificial Sequence
  Cytokine
APTSSSTKKTQLQLEELCLLLQMILNGINNYKNPKLTAMLTAKFAMPKKATELKHLQCLEEALKPLEEVLNLAQSKNFHLRPRDLISNINVIVLELKGSETTFMCEYADETATIVEFLNRWITFCQSIISTLT

SEQ ID NO: 220 - protein, 444 aa, Artificial Sequence; identical to SEQ ID NO: 38
  Polypeptide chain

SEQ ID NO: 221 - protein, 376 aa, Artificial Sequence; identical to SEQ ID NO: 51
  Polypeptide chain

SEQ ID NO: 222 - protein, 372 aa, Artificial Sequence; identical to SEQ ID NO: 49
  Polypeptide chain

SEQ ID NO: 223 - protein, 374 aa, Artificial Sequence
  Polypeptide chain
DKTHTCPPCPAPELLGGPSVFLFPPKPKDTLMISRTPEVTCVVVDVSHEDPEVKFNWYVDGVEVHNAKTKPREEQYASTYRVVSVLTVLHQDWLNGKEYKCKVSNKALPAPIEKTISKAKGQPREPQVYTLPPCRDELTKNQVSLWCLVKGFYPSDIAVEWESNGQPENNYKTTPPVLDSDGSFFLYSKLTVDKSRWQQGNVFSCSVMHEALHNHYTQKSLSLSPGGSGPDSGGFMLTSGPAPTSSSTKKTQLQLEHLLLDLQMILNGINNYKNPKLTRMLTFKFYMPKKATELKHLQCLEEELKPLEEVLNLAQSKNFHLRPRDLISNINVIVLELKGSETTFMCEYADETATIVEFLNRWITFAQSIISTLT

SEQ ID NO: 224 - protein, 374 aa, Artificial Sequence; identical to SEQ ID NO: 48
  Polypeptide chain

SEQ ID NO: 225 - protein, 444 aa, Artificial Sequence; identical to SEQ ID NO: 39
  Polypeptide chain

SEQ ID NO: 226 - protein, 380 aa, Artificial Sequence
  Polypeptide chain
DKTHTCPPCPAPELLGGPSVFLFPPKPKDTLMISRTPEVTCVVVDVSHEDPEVKFNWYVDGVEVHNAKTKPREEQYASTYRVVSVLTVLHQDWLNGKEYKCKVSNKALPAPIEKTISKAKGQPREPQVYTLPPCRDELTKNQVSLWCLVKGFYPSDIAVEWESNGQPENNYKTTPPVLDSDGSFFLYSKLTVDKSRWQQGNVFSCSVMHEALHNHYTQKSLSLSPGGNPMGSDPVNFKLLRVVNGGPAPTSSSTKKTQLQLEHLLLDLQMILNGINNYKNPKLTRMLTSKFYMPKKATELKHLQCLEESLKPLEEVLNLAQSKNFHLRPRDLISNINVIVLELKGSETTFMCEYADETATIVEFLNRWITFAQSIISTLT

SEQ ID NO: 227 - protein, 377 aa, Artificial Sequence
  Polypeptide chain
TIKPCPPCKCPAPNAAGGPSVFIFPPKIKDVLMISLSPIVTCVVVDVSEDDPDVQISWFVNNVEVHTAQTQTHREDYNSTLRVVSALPIQHQDWMSGKEFKCKVNNKDLGAPIERTISKPKGSVRAPQVYVLPPCEEEMTKKQVTLWCMVTDFMPEDIYVEWTNNGKTELNYKNTEPVLDSDGSYFMYSKLRVEKKNWVERNSYSCSVVHEGLHNHHTTKSFSRTPGGGSSPPGGGSSGGGSGPAPTSSSTKKTQLQLEHLLLDLQMILNGINNYKNPKLTAMLTAKFAMPKKATELKHLQCLEEALKPLEEVLNLAQSKNFHLRPRDLISNINVIVLELKGSETTFMCEYADETATIVEFLNRWITFAQSIISTLT

SEQ ID NO: 228 - protein, 373 aa, Artificial Sequence
  Polypeptide chain
TIKPCPPCKCPAPNAAGGPSVFIFPPKIKDVLMISLSPIVTCVVVDVSEDDPDVQISWFVNNVEVHTAQTQTHREDYNSTLRVVSALPIQHQDWMSGKEFKCKVNNKDLGAPIERTISKPKGSVRAPQVYVLPPCEEEMTKKQVTLWCMVTDFMPEDIYVEWTNNGKTELNYKNTEPVLDSDGSYFMYSKLRVEKKNWVERNSYSCSVVHEGLHNHHTTKSFSRTPGGSPGVPLSLYSGPAPTSSSTKKTQLQLEHLLLDLQMILNGINNYKNPKLTAMLTAKFAMPKKATELKHLQCLEEALKPLEEVLNLAQSKNFHLRPRDLISNINVIVLELKGSETTFMCEYADETATIVEFLNRWITFAQSIISTLT

SEQ ID NO: 229 - protein, 445 aa, Artificial Sequence
  Polypeptide chain
TIKPCPPCKCPAPNAAGGPSVFIFPPKIKDVLMISLSPIVTCVVVDVSEDDPDVQISWFVNNVEVHTAQTQTHREDYNSTLRVVSALPIQHQDWMSGKEFKCKVNNKDLGAPIERTISKPKGSVRAPQVCVLPPPEEEMTKKQVTLSCAVTDFMPEDIYVEWTNNGKTELNYKNTEPVLDSDGSYFMVSKLRVEKKNWVERNSYSCSVVHEGLHNHHTTKSFSRTPGPGSGSAVNGTSQFTCFYNSRANISCVWSQDGALQDTSCQVHAWPDRRRWNQTCELLPVSQASWACNLILGAPDSQKLTTVDIVTLRVLCREGVRWRVMAIQDFKPFENLRLMAPISLQVVHVETHRCNISWEISQASHYFERHLEFEARTLSPGHTWEEAPLLTLKQKQEWICLETLTPDTQYEFQVRVKPLQGEFTTWSPWSQPLAFRTKPAALGKD

SEQ ID NO: 230 - protein, 690 aa, Artificial Sequence
  Polypeptide chain
EVQLLESGGGLVQPGGSLRLSCAASGFTFSLFTMSVVVRQAPGKGLEVVVSAISGSGGSTYYADSVKGRFTISRDNSKNTLYLQMNSLRAEDTAVYYCAKSTHLYLFDYWGQGTLVTVSSGGGGSGGGGSGGGGSEIVLTQSPGTLSLSPGERATLSCRASQSVSMPFLAWYQQKPGQAPRLLIYGASSRATGIPDRFSGSGSGTDFTLTISRLEPEDFAVYYCQQMRGRPPTFGQGTKVEIKGGSDKTHTCPPCPAPELLGGPSVFLFPPKPKDTLMISRTPEVTCVVVDVSHEDPEVKFNWYVDGVEVHNAKTKPREEQYASTYRVVSVLTVLHQDWLNGKEYKCKVSNKALPAPIEKTISKAKGQPREPQVCTLPPSRDELTKNQVSLSCAVKGFYPSDIAVEWESNGQPENNYKTTPPVLDSDGSFFLVSKLTVDKSRWQQGNVFSCSVMHEALHNHYTQKSLSLSPGPGSGSAVNGTSQFTCFYNSRANISCVWSQDGALQDTSCQVHAWPDRRRWNQTCELLPVSQASWACNLILGAPDSQKLTTVDIVTLRVLCREGVRWRVMAIQDFKPFENLRLMAPISLQVVHVETHRCNISWEISQASHYFERHLEFEARTLSPGHTWEEAPLLTLKQKQEWICLETLTPDTQYEFQVRVKPLQGEFTTWSPWSQPLAFRTKPAALGKD

SEQ ID NO: 231 - protein, 235 aa, Artificial Sequence
  Polypeptide chain
TIKPCPPCKCPAPNAAGGPSVFIFPPKIKDVLMISLSPIVTCVVVDVSEDDPDVQISWFVNNVEVHTAQTQTHREDYNSTLRVVSALPIQHQDWMSGKEFKCKVNNKDLGAPIERTISKPKGSVRAPQVCVLPPPEEEMTKKQVTLSCAVTDFMPEDIYVEWTNNGKTELNYKNTEPVLDSDGSYFMVSKLRVEKKNWVERNSYSCSVVHEGLHNHHTTKSFSRTPGHHHHHHHH

SEQ ID NO: 232 - protein, 454 aa, Artificial Sequence
  Polypeptide chain
TIKPCPPCKCPAPNAAGGPSVFIFPPKIKDVLMISLSPIVTCVVVDVSEDDPDVQISWFVNNVEVHTAQTQTHREDYNSTLRVVSALPIQHQDWMSGKEFKCKVNNKDLGAPIERTISKPKGSVRAPQVCVLPPPEEEMTKKQVTLSCAVTDFMPEDIYVEWTNNGKTELNYKNTEPVLDSDGSYFMVSKLRVEKKNWVERNSYSCSVVHEGLHNHHTTKSFSRTPGPGSGSAVNGTSQFTCFYNSRANISCVWSQDGALQDTSCQVHAWPDRRRWNQTCELLPVSQASWACNLILGAPDSQKLTTVDIVTLRVLCREGVRWRVMAIQDFKPFENLRLMAPISLQVVHVETHRCNISWEISQASHYFERHLEFEARTLSPGHTWEEAPLLTLKQKQEWICLETLTPDTQYEFQVRVKPLQGEFTTWSPWSQPLAFRTKPAALGKDGHHHHHHHH

SEQ ID NO: 233 - protein, 455 aa, Artificial Sequence
  Polypeptide chain
TIKPCPPCKCPAPNAAGGPSVFIFPPKIKDVLMISLSPIVTCVVVDVSEDDPDVQISWFVNNVEVHTAQTQTHREDYNSTLRVVSALPIQHQDWMSGKEFKCKVNNKDLGAPIERTISKPKGSVRAPQVCVLPPPEEEMTKKQVTLSCAVTDFMPEDIYVEWTNNGKTELNYKNTEPVLDSDGSYFMVSKLRVEKKNWVERNSYSCSVVHEGLHNHHTTKSFSRTPGPGSGSAVKNCSHLECFYNSRANVSCMWSHEEALNVTTCHVHAKSNLRHWNKTCELTLVRQASWACNLILGSFPESQSLTSVDLLDINVVCWEEKGWRRVKTCDFHPFDNLRLVAPHSLQVLHIDTQRCNISWKVSQVSHYIEPYLEFEARRRLLGHSWEDASVLSLKQRQQWLFLEMLIPSTSYEVQVRVKAQRNNTGTWSPWSQPLTFRTRPADPMKEGHHHHHHHH

SEQ ID NO: 234 - protein, 444 aa, Artificial Sequence
  Polypeptide chain
DKTHTCPPCPAPELLGGPSVFLFPPKPKDTLMISRTPEVTCVVVDVSHEDPEVKFNWYVDGVEVHNAKTKPREEQYASTYRVVSVLTVLHQDWLNGKEYKCKVSNKALPAPIEKTISKAKGQPREPQVCTLPPSRDELTKNQVSLSCAVKGFYPSDIAVEWESNGQPENNYKTTPPVLDSDGSFFLVSKLTVDKSRWQQGNVFSCSVMHEALHNHYTQKSLSLSPGPGSGSAVNGTSQFTCFYNSRANISCVWSQDGALQDTSCQVHAWPDRRRWNQTCELLPVSQASWACNLILGAPDSQKLTTVDIVTLRVLCREGVRWRVMAIQDFKPFENLRLMAPISLQVVHVETHRCNISWEISQASHYFERHLEFEARTLSPGHTWEEAPLLTLKQKQEWISLETLTPDTQYEFQVRVKPLQGEFTTWSPWSQPLAFRTKPAALGKD

SEQ ID NO: 235 - protein, 374 aa, Artificial Sequence
  Polypeptide chain
VRSGCKPCICTVPEVSSVFIFPPKPKDVLTITLTPKVTCVVVAISKDDPEVQFSWFVDDVEVHTAQTQPREEQFNSTFRSVSELPIMHQDWLNGKEFKCRVNSAAFGAPIEKTISKTKGRPKAPQVYTIPPPKEQMAKDKVSLTCMITDFFPEDITVEWQWNGQPAENYDNTQPIMDTDGSYFVYSDLNVQKSNWEAGNTFTCSVLHEGLHNHHTEKSLSHSPGGGSSPPGGGSSGGGSGPAPTSSSTKKTQLQLEHLLLDLQMILNGINNYKNPKLTAMLTAKFAMPKKATELKHLQCLEEALKPLEEVLNLAQSKNFHLRPRDLISNINVIVLELKGSETTFMCEYADETATIVEFLNRWITFAQSIISTLT

SEQ ID NO: 236 - protein, 370 aa, Artificial Sequence
  Polypeptide chain
VRSGCKPCICTVPEVSSVFIFPPKPKDVLTITLTPKVTCVVVAISKDDPEVQFSWFVDDVEVHTAQTQPREEQFNSTFRSVSELPIMHQDWLNGKEFKCRVNSAAFGAPIEKTISKTKGRPKAPQVYTIPPPKEQMAKDKVSLTCMITDFFPEDITVEWQWNGQPAENYDNTQPIMDTDGSYFVYSDLNVQKSNWEAGNTFTCSVLHEGLHNHHTEKSLSHSPGGSPGVPLSLYSGPAPTSSSTKKTQLQLEHLLLDLQMILNGINNYKNPKLTAMLTAKFAMPKKATELKHLQCLEEALKPLEEVLNLAQSKNFHLRPRDLISNINVIVLELKGSETTFMCEYADETATIVEFLNRWITFAQSIISTLT

SEQ ID NO: 237 - protein, 442 aa, Artificial Sequence
  Polypeptide chain
VRSGCKPCICTVPEVSSVFIFPPKPKDVLTITLTPKVTCVVVAISKDDPEVQFSWFVDDVEVHTAQTQPREEQFNSTFRSVSELPIMHQDWLNGKEFKCRVNSAAFGAPIEKTISKTKGRPKAPQVYTIPPPKKQMAKDKVSLTCMITDFFPEDITVEWQWNGQPAENYKNTQPIMKTDGSYFVYSKLNVQKSNWEAGNTFTCSVLHEGLHNHHTEKSLSHSPGPGSGSAVNGTSQFTCFYNSRANISCVWSQDGALQDTSCQVHAWPDRRRWNQTCELLPVSQASWACNLILGAPDSQKLTTVDIVTLRVLCREGVRWRVMAIQDFKPFENLRLMAPISLQVVHVETHRCNISWEISQASHYFERHLEFEARTLSPGHTWEEAPLLTLKQKQEWICLETLTPDTQYEFQVRVKPLQGEFTTWSPWSQPLAFRTKPAALGKD

SEQ ID NO: 238 - protein, 443 aa, Artificial Sequence
  Polypeptide chain
VRSGCKPCICTVPEVSSVFIFPPKPKDVLTITLTPKVTCVVVAISKDDPEVQFSWFVDDVEVHTAQTQPREEQFNSTFRSVSELPIMHQDWLNGKEFKCRVNSAAFGAPIEKTISKTKGRPKAPQVYTIPPPKKQMAKDKVSLTCMITDFFPEDITVEWQWNGQPAENYKNTQPIMKTDGSYFVYSKLNVQKSNWEAGNTFTCSVLHEGLHNHHTEKSLSHSPGPGSGSAVKNCSHLECFYNSRANVSCMWSHEEALNVTTCHVHAKSNLRHWNKTCELTLVRQASWACNLILGSFPESQSLTSVDLLDINVVCWEEKGWRRVKTCDFHPFDNLRLVAPHSLQVLHIDTQRCNISWKVSQVSHYIEPYLEFEARRRLLGHSWEDASVLSLKQRQQWLFLEMLIPSTSYEVQVRVKAQRNNTGTWSPWSQPLTFRTRPADPMKE

SEQ ID NO: 239 - protein, 376 aa, Artificial Sequence
  Polypeptide chain
DKTHTCPPCPAPELLGGPSVFLFPPKPKDTLMISRTPEVTCVVVDVSHEDPEVKFNWYVDGVEVHNAKTKPREEQYASTYRVVSVLTVLHQDWLNGKEYKCKVSNKALPAPIEKTISKAKGQPREPQVYTLPPCRDELTKNQVSLWCLVKGFYPSDIAVEWESNGQPENNYKTTPPVLDSDGSFFLYSKLTVDKSRWQQGNVFSCSVMHEALHNHYTQKSLSLSPGGISSGLLSGRSDQPSGPAPTSSSTKKTQLQLEHLLLDLQMILNGINNYKNPKLTAMLTAKFAMPKKATELKHLQCLEEALKPLEEVLNLAQSKNFHLRPRDLISNINVIVLELKGSETTFMCEYADETATIVEFLNRWITFAQSIISTLT

SEQ ID NO: 240 - protein, 459 aa, Artificial Sequence; identical to SEQ ID NO: 42
  Polypeptide chain

SEQ ID NO: 241 - protein, 372 aa, Artificial Sequence
  Polypeptide chain
DKTHTCPPCPAPELLGGPSVFLFPPKPKDTLMISRTPEVTCVVVDVSHEDPEVKFNWYVDGVEVHNAKTKPREEQYASTYRVVSVLTVLHQDWLNGKEYKCKVSNKALPAPIEKTISKAKGQPREPQVYTLPPCRDELTKNQVSLWCLVKGFYPSDIAVEWESNGQPENNYKTTPPVLDSDGSFFLYSKLTVDKSRWQQGNVFSCSVMHEALHNHYTQKSLSLSPGGSPGVPLSLYSGPAPTSSSTKKTQLQLEHLLLDLQMILNGINNYKNPKLTAMLTAKFAMPKKATELKHLQCLEEALKPLEEVLNLAQSKNFHFDPRDVVSNINVFVLELKGSETTFMCEYADETATIVEFLNRWITFAQSIISTLT

SEQ ID NO: 242 - protein, 373 aa, Artificial Sequence
  Polypeptide chain
DKTHTCPPCPAPELLGGPSVFLFPPKPKDTLMISRTPEVTCVVVDVSHEDPEVKFNWYVDGVEVHNAKTKPREEQYASTYRVVSVLTVLHQDWLNGKEYKCKVSNKALPAPIEKTISKAKGQPREPQVYTLPPCRDELTKNQVSLWCLVKGFYPSDIAVEWESNGQPENNYKTTPPVLDSDGSFFLYSKLTVDKSRWQQGNVFSCSVMHEALHNHYTQKSLSLSPGGISSGLLSGRSSGPAPTSSSTKKTQLQLEHLLLDLQMILNGINNYKNPKLTAMLTAKFAMPKKATELKHLQCLEEALKPLEEVLNLAQSKNFHLRPRDLISNINVIVLELKGSETTFMCEYADETATIVEFLNRWITFAQSIISTLT

SEQ ID NO: 243 - protein, 376 aa, Artificial Sequence
  Polypeptide chain
DKTHTCPPCPAPELLGGPSVFLFPPKPKDTLMISRTPEVTCVVVDVSHEDPEVKFNWYVDGVEVHNAKTKPREEQYASTYRVVSVLTVLHQDWLNGKEYKCKVSNKALPAPIEKTISKAKGQPREPQVYTLPPCRDELTKNQVSLWCLVKGFYPSDIAVEWESNGQPENNYKTTPPVLDSDGSFFLYSKLTVDKSRWQQGNVFSCSVMHEALHNHYTQKSLSLSPGGGSSPPGGGSSGGGSGPAPTSSSTKKTQLQLEHLLLDLQMILNGINNYKNPKLTAMLTAKFAMPKKATELKHLQCLEEALKPLEEVLNLAQSKNFHFDPRDVVSNINVFVLELKGSETTFMCEYADETATIVEFLNRWITFAQSIISTLT

SEQ ID NO: 244 - protein, 449 aa, Artificial Sequence
  Polypeptide chain
EPKSSDKTHTCPPCPAPELLGGPSVFLFPPKPKDTLMISRTPEVTCVVVDVSHEDPEVKFNWYVDGVEVHNAKTKPREEQYASTYRVVSVLTVLHQDWLNGKEYKCKVSNKALPAPIEKTISKAKGQPREPQVCTLPPSRDELTKNQVSLSCAVKGFYPSDIAVEWESNGQPENNYKTTPPVLDSDGSFFLVSKLTVDKSRWQQGNVFSCSVMHEALHNHYTQKSLSLSPGPGSGSAVNGTSQFTCFYNSRANISCVWSQDGALQDTSCQVHAWPDRRRWNQTCELLPVSQASWACNLILGAPDSQKLTTVDIVTLRVLCREGVRWRVMAIQDFKPFENLRLMAPISLQVVHVETHRCNISWEISQASHYFERHLEFEARTLSPGHTWEEAPLLTLKQKQEWICLETLTPDTQYEFQVRVKPLQGEFTTWSPWSQPLAFRTKPAALGKD

SEQ ID NO: 245 - protein, 447 aa, Artificial Sequence
  Polypeptide chain
AKTDKTHTCPPCPAPELLGGPSVFLFPPKPKDTLMISRTPEVTCVVVDVSHEDPEVKFNWYVDGVEVHNAKTKPREEQYASTYRVVSVLTVLHQDWLNGKEYKCKVSNKALPAPIEKTISKAKGQPREPQVCTLPPSRDELTKNQVSLSCAVKGFYPSDIAVEWESNGQPENNYKTTPPVLDSDGSFFLVSKLTVDKSRWQQGNVFSCSVMHEALHNHYTQKSLSLSPGPGSGSAVNGTSQFTCFYNSRANISCVWSQDGALQDTSCQVHAWPDRRRWNQTCELLPVSQASWACNLILGAPDSQKLTTVDIVTLRVLCREGVRWRVMAIQDFKPFENLRLMAPISLQVVHVETHRCNISWEISQASHYFERHLEFEARTLSPGHTWEEAPLLTLKQKQEWICLETLTPDTQYEFQVRVKPLQGEFTTWSPWSQPLAFRTKPAALGKD

SEQ ID NO: 246 - protein, 452 aa, Artificial Sequence
  Polypeptide chain
AKTEPKSSDKTHTCPPCPAPELLGGPSVFLFPPKPKDTLMISRTPEVTCVVVDVSHEDPEVKFNWYVDGVEVHNAKTKPREEQYASTYRVVSVLTVLHQDWLNGKEYKCKVSNKALPAPIEKTISKAKGQPREPQVCTLPPSRDELTKNQVSLSCAVKGFYPSDIAVEWESNGQPENNYKTTPPVLDSDGSFFLVSKLTVDKSRWQQGNVFSCSVMHEALHNHYTQKSLSLSPGPGSGSAVNGTSQFTCFYNSRANISCVWSQDGALQDTSCQVHAWPDRRRWNQTCELLPVSQASWACNLILGAPDSQKLTTVDIVTLRVLCREGVRWRVMAIQDFKPFENLRLMAPISLQVVHVETHRCNISWEISQASHYFERHLEFEARTLSPGHTWEEAPLLTLKQKQEWICLETLTPDTQYEFQVRVKPLQGEFTTWSPWSQPLAFRTKPAALGKD

SEQ ID NO: 247 - protein, 377 aa, Artificial Sequence
  Polypeptide chain
EPKSSDKTHTCPPCPAPELLGGPSVFLFPPKPKDTLMISRTPEVTCVVVDVSHEDPEVKFNWYVDGVEVHNAKTKPREEQYASTYRVVSVLTVLHQDWLNGKEYKCKVSNKALPAPIEKTISKAKGQPREPQVYTLPPCRDELTKNQVSLWCLVKGFYPSDIAVEWESNGQPENNYKTTPPVLDSDGSFFLYSKLTVDKSRWQQGNVFSCSVMHEALHNHYTQKSLSLSPGGSPGVPLSLYSGPAPTSSSTKKTQLQLEHLLLDLQMILNGINNYKNPKLTAMLTAKFAMPKKATELKHLQCLEEALKPLEEVLNLAQSKNFHLRPRDLISNINVIVLELKGSETTFMCEYADETATIVEFLNRWITFAQSIISTLT

SEQ ID NO: 248 - protein, 375 aa, Artificial Sequence
  Polypeptide chain
AKTDKTHTCPPCPAPELLGGPSVFLFPPKPKDTLMISRTPEVTCVVVDVSHEDPEVKFNWYVDGVEVHNAKTKPREEQYASTYRVVSVLTVLHQDWLNGKEYKCKVSNKALPAPIEKTISKAKGQPREPQVYTLPPCRDELTKNQVSLWCLVKGFYPSDIAVEWESNGQPENNYKTTPPVLDSDGSFFLYSKLTVDKSRWQQGNVFSCSVMHEALHNHYTQKSLSLSPGGSPGVPLSLYSGPAPTSSSTKKTQLQLEHLLLDLQMILNGINNYKNPKLTAMLTAKFAMPKKATELKHLQCLEEALKPLEEVLNLAQSKNFHLRPRDLISNINVIVLELKGSETTFMCEYADETATIVEFLNRWITFAQSIISTLT

SEQ ID NO: 249 - protein, 380 aa, Artificial Sequence
  Polypeptide chain
AKTEPKSSDKTHTCPPCPAPELLGGPSVFLFPPKPKDTLMISRTPEVTCVVVDVSHEDPEVKFNWYVDGVEVHNAKTKPREEQYASTYRVVSVLTVLHQDWLNGKEYKCKVSNKALPAPIEKTISKAKGQPREPQVYTLPPCRDELTKNQVSLWCLVKGFYPSDIAVEWESNGQPENNYKTTPPVLDSDGSFFLYSKLTVDKSRWQQGNVFSCSVMHEALHNHYTQKSLSLSPGGSPGVPLSLYSGPAPTSSSTKKTQLQLEHLLLDLQMILNGINNYKNPKLTAMLTAKFAMPKKATELKHLQCLEEALKPLEEVLNLAQSKNFHLRPRDLISNINVIVLELKGSETTFMCEYADETATIVEFLNRWITFAQSIISTLT

SEQ ID NO: 250 - protein, 460 aa, Artificial Sequence; identical to SEQ ID NO: 41
  Polypeptide chain

SEQ ID NO: 251 - protein, 372 aa, Artificial Sequence
  Polypeptide chain
DKTHTCPPCPAPELLGGPSVFLFPPKPKDTLMISRTPEVTCVVVDVSHEDPEVKFNWYVDGVEVHNAKTKPREEQYASTYRVVSVLTVLHQDWLNGKEYKCKVSNKALPAPIEKTISKAKGQPREPQVYTLPPCRDELTKNQVSLWCLVKGFYPSDIAVEWESNGQPENNYKTTPPVLDSDGSFFLYSKLTVDKSRWQQGNVFSCSVMHEALHNHYTQKSLSLSPGGSPGVPLSLYSGPAPTSSSTKKTQLQLRHLCLRLQMILNGINNYKNPKLTAMLTAKFAMPKKATELKHLQCLEEALKPLEEVLNLAQSKNFHLRPRDLISNINVIVLELKGSETTFMCEYADETATIVEFLNRWITFCQSIISTLT

SEQ ID NO: 252 - protein, 372 aa, Artificial Sequence
  Polypeptide chain
DKTHTCPPCPAPELLGGPSVFLFPPKPKDTLMISRTPEVTCVVVDVSHEDPEVKFNWYVDGVEVHNAKTKPREEQYASTYRVVSVLTVLHQDWLNGKEYKCKVSNKALPAPIEKTISKAKGQPREPQVYTLPPCRDELTKNQVSLWCLVKGFYPSDIAVEWESNGQPENNYKTTPPVLDSDGSFFLYSKLTVDKSRWQQGNVFSCSVMHEALHNHYTQKSLSLSPGGSPGVPLSLYSGPAPTSSSTKKTQLQLRHLCLRLQMILNGINNYKNPKLTAMLTAKFAMPKKATELKHLQCLEEALKPLEEVLNLAQSKNFHLRPRDLISLINVIVLELKGSETTFMCEYADETATIVEFLNRWITFCQSIISTLT

SEQ ID NO: 253 - protein, 372 aa, Artificial Sequence
  Polypeptide chain
DKTHTCPPCPAPELLGGPSVFLFPPKPKDTLMISRTPEVTCVVVDVSHEDPEVKFNWYVDGVEVHNAKTKPREEQYASTYRVVSVLTVLHQDWLNGKEYKCKVSNKALPAPIEKTISKAKGQPREPQVYTLPPCRDELTKNQVSLWCLVKGFYPSDIAVEWESNGQPENNYKTTPPVLDSDGSFFLYSKLTVDKSRWQQGNVFSCSVMHEALHNHYTQKSLSLSPGGSPGVPLSLYSGPAPTSSSTKKTQLQLLHLCLRLQMILNGINNYKNPKLTAMLTAKFAMPKKATELKHLQCLEEALKPLEEVLNLAQSKNFHLRPRDLISLINVIVLELKGSETTFMCEYADETATIVEFLNRWITFCQSIISTLT

SEQ ID NO: 254 - protein, 372 aa, Artificial Sequence
  Polypeptide chain
DKTHTCPPCPAPELLGGPSVFLFPPKPKDTLMISRTPEVTCVVVDVSHEDPEVKFNWYVDGVEVHNAKTKPREEQYASTYRVVSVLTVLHQDWLNGKEYKCKVSNKALPAPIEKTISKAKGQPREPQVYTLPPCRDELTKNQVSLWCLVKGFYPSDIAVEWESNGQPENNYKTTPPVLDSDGSFFLYSKLTVDKSRWQQGNVFSCSVMHEALHNHYTQKSLSLSPGGSPGVPLSLYSGPAPTSSSTKKTQLQLRHLCLDLQMILNGINNYKNPKLTAMLTAKFAMPKKATELKHLQCLEEALKPLEEVLNLAQSKNFHLRPRDLISLINVIVLELKGSETTFMCEYADETATIVEFLNRWITFCQSIISTLT

SEQ ID NO: 255 - protein, 372 aa, Artificial Sequence
  Polypeptide chain
DKTHTCPPCPAPELLGGPSVFLFPPKPKDTLMISRTPEVTCVVVDVSHEDPEVKFNWYVDGVEVHNAKTKPREEQYASTYRVVSVLTVLHQDWLNGKEYKCKVSNKALPAPIEKTISKAKGQPREPQVYTLPPCRDELTKNQVSLWCLVKGFYPSDIAVEWESNGQPENNYKTTPPVLDSDGSFFLYSKLTVDKSRWQQGNVFSCSVMHEALHNHYTQKSLSLSPGGSPGVPLSLYSGPAPTSSSTKKTQLQLEHLCLRLQMILNGINNYKNPKLTAMLTAKFAMPKKATELKHLQCLEEALKPLEEVLNLAQSKNFHLRPRDLISLINVIVLELKGSETTFMCEYADETATIVEFLNRWITFCQSIISTLT

SEQ ID NO: 256 - protein, 372 aa, Artificial Sequence
  Polypeptide chain
DKTHTCPPCPAPELLGGPSVFLFPPKPKDTLMISRTPEVTCVVVDVSHEDPEVKFNWYVDGVEVHNAKTKPREEQYASTYRVVSVLTVLHQDWLNGKEYKCKVSNKALPAPIEKTISKAKGQPREPQVYTLPPCRDELTKNQVSLWCLVKGFYPSDIAVEWESNGQPENNYKTTPPVLDSDGSFFLYSKLTVDKSRWQQGNVFSCSVMHEALHNHYTQKSLSLSPGGSPGVPLSLYSGPAPTSSSTKKTQLQLFHLCLRLQMILNGINNYKNPKLTAMLTAKFAMPKKATELKHLQCLEEALKPLEEVLNLAQSKNFHLRPRDLISLINVIVLELKGSETTFMCEYADETATIVEFLNRWITFCQSIISTLT

SEQ ID NO: 257 - protein, 444 aa, Artificial Sequence; identical to SEQ ID NO: 43
  Polypeptide chain

SEQ ID NO: 258 - protein, 444 aa, Artificial Sequence
  Polypeptide chain
DKTHTCPPCPAPELLGGPSVFLFPPKPKDTLYITREPEVTCVVVDVSHEDPEVKFNWYVDGVEVHNAKTKPREEQYASTYRVVSVLTVLHQDWLNGKEYKCKVSNKALPAPIEKTISKAKGQPREPQVCTLPPSRDELTKNQVSLSCAVKGFYPSDIAVEWESNGQPENNYKTTPPVLDSDGSFFLVSKLTVDKSRWQQGNVFSCSVMHEALHNHYTQKSLSLSPGPGSGSAVNGTSQFTCFYNSRANISCVWSQDGALQDTSCQVHAWPDRRRWNQTCELLPVSQASWACNLILGAPDSQKLTTVDIVTLRVLCREGVRWRVMAIQDFKPFENLRLMAPISLQVVHVETHRCNISWEISQASHYFERHLEFEARTLSPGHTWEEAPLLTLKQKQEWICLETLTPDTQYEFQVRVKPLQGEFTTWSPWSQPLAFRTKPAALGKD

SEQ ID NO: 259 - protein, 376 aa, Artificial Sequence
  Polypeptide chain
DKTHTCPPCPAPELLGGPSVFLFPPKPKDTLMASRTPEVTCVVVDVSHEDPEVKFNWYVDGVEVHNAKTKPREEQYASTYRVVSVLTVLHQDWLNGKEYKCKVSNKALPAPIEKTISKAKGQPREPQVYTLPPCRDELTKNQVSLWCLVKGFYPSDIAVEWESNGQPENNYKTTPPVLDSDGSFFLYSKLTVDKSRWQQGNVFSCSVMHEALHNHYTQKSLSLSPGGGSSPPGGGSSGGGSGPAPTSSSTKKTQLQLEHLLLDLQMILNGINNYKNPKLTAMLTAKFAMPKKATELKHLQCLEEALKPLEEVLNLAQSKNFHLRPRDLISNINVIVLELKGSETTFMCEYADETATIVEFLNRWITFAQSIISTLT

SEQ ID NO: 260 - protein, 376 aa, Artificial Sequence
  Polypeptide chain
DKTHTCPPCPAPELLGGPSVFLFPPKPKDTLYITREPEVTCVVVDVSHEDPEVKFNWYVDGVEVHNAKTKPREEQYASTYRVVSVLTVLHQDWLNGKEYKCKVSNKALPAPIEKTISKAKGQPREPQVYTLPPCRDELTKNQVSLWCLVKGFYPSDIAVEWESNGQPENNYKTTPPVLDSDGSFFLYSKLTVDKSRWQQGNVFSCSVMHEALHNHYTQKSLSLSPGGGSSPPGGGSSGGGSGPAPTSSSTKKTQLQLEHLLLDLQMILNGINNYKNPKLTAMLTAKFAMPKKATELKHLQCLEEALKPLEEVLNLAQSKNFHLRPRDLISNINVIVLELKGSETTFMCEYADETATIVEFLNRWITFAQSIISTLT

SEQ ID NO: 261 - protein, 372 aa, Artificial Sequence; identical to SEQ ID NO: 50
  Polypeptide chain

SEQ ID NO: 262 - protein, 372 aa, Artificial Sequence
  Polypeptide chain
DKTHTCPPCPAPELLGGPSVFLFPPKPKDTLYITREPEVTCVVVDVSHEDPEVKFNWYVDGVEVHNAKTKPREEQYASTYRVVSVLTVLHQDWLNGKEYKCKVSNKALPAPIEKTISKAKGQPREPQVYTLPPCRDELTKNQVSLWCLVKGFYPSDIAVEWESNGQPENNYKTTPPVLDSDGSFFLYSKLTVDKSRWQQGNVFSCSVMHEALHNHYTQKSLSLSPGGSPGVPLSLYSGPAPTSSSTKKTQLQLEHLLLDLQMILNGINNYKNPKLTAMLTAKFAMPKKATELKHLQCLEEALKPLEEVLNLAQSKNFHLRPRDLISNINVIVLELKGSETTFMCEYADETATIVEFLNRWITFAQSIISTLT

SEQ ID NO: 263 - protein, 372 aa, Artificial Sequence
  Polypeptide chain
DKTHTCPPCPAPELLGGPSVFLFPPKPKDTLMISRTPEVTCVVVDVSHEDPEVKFNWYVDGVEVHNAKTKPREEQYASTYRVVSVLTVLHQDWLNGKEYKCKVSNKALPAPIEKTISKAKGQPREPQVYTLPPCRDELTKNQVSLWCLVKGFYPSDIAVEWESNGQPENNYKTTPPVLDSDGSFFLYSKLTVDKSRWQQGNVFSCSVMHEALHNHYTQKSLSLSPGGSPGVPLSLYSGPAPTSSSTKKTQLQLEHLCLDLQMILNGINNYKNPKLTAMLTAKFAMPKKATELKHLQCLEEALKPLEEVLNLAQSKNFHLRPRDLISNINVIVLELKGSETTFMCEYADETATIVEFLNRWITFCQSIISTLT

SEQ ID NO: 264 - protein, 372 aa, Artificial Sequence
  Polypeptide chain
DKTHTCPPCPAPELLGGPSVFLFPPKPKDTLMISRTPEVTCVVVDVSHEDPEVKFNWYVDGVEVHNAKTKPREEQYASTYRVVSVLTVLHQDWLNGKEYKCKVSNKALPAPIEKTISKAKGQPREPQVYTLPPCRDELTKNQVSLWCLVKGFYPSDIAVEWESNGQPENNYKTTPPVLDSDGSFFLYSKLTVDKSRWQQGNVFSCSVMHEALHNHYTQKSLSLSPGGSPGVPLSLYSGPAPTSSSTKKTQLQLEYLLLDLQMILNGINNYKNPKLTAMLTAKFAMPKKATELKHLQCLEEALKPLEEVLNLAQSKNFHLRPRDLISNINVIVLELKGSETTFMCEYADETATIVEFLNRWITFAQSIISTLT

SEQ ID NO: 265 - protein, 372 aa, Artificial Sequence
  Polypeptide chain
DKTHTCPPCPAPELLGGPSVFLFPPKPKDTLMISRTPEVTCVVVDVSHEDPEVKFNWYVDGVEVHNAKTKPREEQYASTYRVVSVLTVLHQDWLNGKEYKCKVSNKALPAPIEKTISKAKGQPREPQVYTLPPCRDELTKNQVSLWCLVKGFYPSDIAVEWESNGQPENNYKTTPPVLDSDGSFFLYSKLTVDKSRWQQGNVFSCSVMHEALHNHYTQKSLSLSPGGSPGVPLSLYSGPAPTSSSTKKTQLQLEELLLDLQMILNGINNYKNPKLTAMLTAKFAMPKKATELKHLQCLEEALKPLEEVLNLAQSKNFHLRPRDLISNINVIVLELKGSETTFMCEYADETATIVEFLNRWITFAQSIISTLT

SEQ ID NO: 266 - protein, 372 aa, Artificial Sequence
  Polypeptide chain
DKTHTCPPCPAPELLGGPSVFLFPPKPKDTLMISRTPEVTCVVVDVSHEDPEVKFNWYVDGVEVHNAKTKPREEQYASTYRVVSVLTVLHQDWLNGKEYKCKVSNKALPAPIEKTISKAKGQPREPQVYTLPPCRDELTKNQVSLWCLVKGFYPSDIAVEWESNGQPENNYKTTPPVLDSDGSFFLYSKLTVDKSRWQQGNVFSCSVMHEALHNHYTQKSLSLSPGGSPGVPLSLYSGPAPTSSSTKKTQLQLEHLLLLLQMILNGINNYKNPKLTAMLTAKFAMPKKATELKHLQCLEEALKPLEEVLNLAQSKNFHLRPRDLISNINVIVLELKGSETTFMCEYADETATIVEFLNRWITFAQSIISTLT

SEQ ID NO: 267 - protein, 372 aa, Artificial Sequence
  Polypeptide chain
DKTHTCPPCPAPELLGGPSVFLFPPKPKDTLMISRTPEVTCVVVDVSHEDPEVKFNWYVDGVEVHNAKTKPREEQYASTYRVVSVLTVLHQDWLNGKEYKCKVSNKALPAPIEKTISKAKGQPREPQVYTLPPCRDELTKNQVSLWCLVKGFYPSDIAVEWESNGQPENNYKTTPPVLDSDGSFFLYSKLTVDKSRWQQGNVFSCSVMHEALHNHYTQKSLSLSPGGSPGVPLSLYSGPAPTSSSTKKTQLQLEYLCLDLQMILNGINNYKNPKLTAMLTAKFAMPKKATELKHLQCLEEALKPLEEVLNLAQSKNFHLRPRDLISNINVIVLELKGSETTFMCEYADETATIVEFLNRWITFCQSIISTLT

SEQ ID NO: 268 - protein, 372 aa, Artificial Sequence
  Polypeptide chain
DKTHTCPPCPAPELLGGPSVFLFPPKPKDTLMISRTPEVTCVVVDVSHEDPEVKFNWYVDGVEVHNAKTKPREEQYASTYRVVSVLTVLHQDWLNGKEYKCKVSNKALPAPIEKTISKAKGQPREPQVYTLPPCRDELTKNQVSLWCLVKGFYPSDIAVEWESNGQPENNYKTTPPVLDSDGSFFLYSKLTVDKSRWQQGNVFSCSVMHEALHNHYTQKSLSLSPGGSPGVPLSLYSGPAPTSSSTKKTQLQLEELCLDLQMILNGINNYKNPKLTAMLTAKFAMPKKATELKHLQCLEEALKPLEEVLNLAQSKNFHLRPRDLISNINVIVLELKGSETTFMCEYADETATIVEFLNRWITFCQSIISTLT

SEQ ID NO: 269 - protein, 372 aa, Artificial Sequence
  Polypeptide chain
DKTHTCPPCPAPELLGGPSVFLFPPKPKDTLMISRTPEVTCVVVDVSHEDPEVKFNWYVDGVEVHNAKTKPREEQYASTYRVVSVLTVLHQDWLNGKEYKCKVSNKALPAPIEKTISKAKGQPREPQVYTLPPCRDELTKNQVSLWCLVKGFYPSDIAVEWESNGQPENNYKTTPPVLDSDGSFFLYSKLTVDKSRWQQGNVFSCSVMHEALHNHYTQKSLSLSPGGSPGVPLSLYSGPAPTSSSTKKTQLQLEHLCLLLQMILNGINNYKNPKLTAMLTAKFAMPKKATELKHLQCLEEALKPLEEVLNLAQSKNFHLRPRDLISNINVIVLELKGSETTFMCEYADETATIVEFLNRWITFCQSIISTLT

SEQ ID NO: 270 - protein, 372 aa, Artificial Sequence
  Polypeptide chain
DKTHTCPPCPAPELLGGPSVFLFPPKPKDTLMISRTPEVTCVVVDVSHEDPEVKFNWYVDGVEVHNAKTKPREEQYASTYRVVSVLTVLHQDWLNGKEYKCKVSNKALPAPIEKTISKAKGQPREPQVYTLPPCRDELTKNQVSLWCLVKGFYPSDIAVEWESNGQPENNYKTTPPVLDSDGSFFLYSKLTVDKSRWQQGNVFSCSVMHEALHNHYTQKSLSLSPGGSPGVPLSLYSGPAPTSSSTKKTQLQLEYLCLLLQMILNGINNYKNPKLTAMLTAKFAMPKKATELKHLQCLEEALKPLEEVLNLAQSKNFHLRPRDLISNINVIVLELKGSETTFMCEYADETATIVEFLNRWITFCQSIISTLT

SEQ ID NO: 271 - protein, 372 aa, Artificial Sequence
  Polypeptide chain
DKTHTCPPCPAPELLGGPSVFLFPPKPKDTLMISRTPEVTCVVVDVSHEDPEVKFNWYVDGVEVHNAKTKPREEQYASTYRVVSVLTVLHQDWLNGKEYKCKVSNKALPAPIEKTISKAKGQPREPQVYTLPPCRDELTKNQVSLWCLVKGFYPSDIAVEWESNGQPENNYKTTPPVLDSDGSFFLYSKLTVDKSRWQQGNVFSCSVMHEALHNHYTQKSLSLSPGGSPGVPLSLYSGPAPTSSSTKKTQLQLEELCLLLQMILNGINNYKNPKLTAMLTAKFAMPKKATELKHLQCLEEALKPLEEVLNLAQSKNFHLRPRDLISNINVIVLELKGSETTFMCEYADETATIVEFLNRWITFCQSIISTLT

SEQ ID NO: 272 - protein, 446 aa, Artificial Sequence
  Polypeptide chain
ESKYGPPCPPCPAPEFLGGPSVFLFPPKPKDTLMISRTPEVTCVVVDVSQEDPEVQFNWYVDGVEVHNAKTKPREEQFNSTYRVVSVLTVLHQDWLNGKEYKCKVSNKGLPSSIEKTISKAKGQPREPQVCTLPPSQEEMTKNQVSLSCAVKGFYPSDIAVEWESNGQPENNYKTTPPVLDSDGSFFLYSRLTVDKSRWQEGNVFSCSVMHEALHNHYTQKSLSLSLGPGSGSAVNGTSQFTCFYNSRANISCVWSQDGALQDTSCQVHAWPDRRRWNQTCELLPVSQASWACNLILGAPDSQKLTTVDIVTLRVLCREGVRWRVMAIQDFKPFENLRLMAPISLQVVHVETHRCNISWEISQASHYFERHLEFEARTLSPGHTWEEAPLLTLKQKQEWICLETLTPDTQYEFQVRVKPLQGEFTTWSPWSQPLAFRTKPAALGKD

SEQ ID NO: 273 - protein, 378 aa, Artificial Sequence
  Polypeptide chain
ESKYGPPCPPCPAPEFLGGPSVFLFPPKPKDTLMISRTPEVTCVVVDVSQEDPEVQFNWYVDGVEVHNAKTKPREEQFNSTYRVVSVLTVLHQDWLNGKEYKCKVSNKGLPSSIEKTISKAKGQPREPQVYTLPPCQEEMTKNQVSLWCLVKGFYPSDIAVEWESNGQPENNYKTTPPVLDSDGSFFLYSRLTVDKSRWQEGNVFSCSVMHEALHNHYTQKSLSLSLGGGSSPPGGGSSGGGSGPAPTSSSTKKTQLQLEHLLLDLQMILNGINNYKNPKLTAMLTAKFAMPKKATELKHLQCLEEALKPLEEVLNLAQSKNFHLRPRDLISNINVIVLELKGSETTFMCEYADETATIVEFLNRWITFAQSIISTLT

SEQ ID NO: 274 - protein, 374 aa, Artificial Sequence
  Polypeptide chain
ESKYGPPCPPCPAPEFLGGPSVFLFPPKPKDTLMISRTPEVTCVVVDVSQEDPEVQFNWYVDGVEVHNAKTKPREEQFNSTYRVVSVLTVLHQDWLNGKEYKCKVSNKGLPSSIEKTISKAKGQPREPQVYTLPPCQEEMTKNQVSLWCLVKGFYPSDIAVEWESNGQPENNYKTTPPVLDSDGSFFLYSRLTVDKSRWQEGNVFSCSVMHEALHNHYTQKSLSLSLGGSPGVPLSLYSGPAPTSSSTKKTQLQLEHLLLDLQMILNGINNYKNPKLTAMLTAKFAMPKKATELKHLQCLEEALKPLEEVLNLAQSKNFHLRPRDLISNINVIVLELKGSETTFMCEYADETATIVEFLNRWITFAQSIISTLT

SEQ ID NO: 275 - protein, 459 aa, Artificial Sequence
  Polypeptide chain
DKTHTCPPCPAPELLGGPSVFLFPPKPKDTLMISRTPEVTCVVVDVSHEDPEVKFNWYVDGVEVHNAKTKPREEQYASTYRVVSVLTVLHQDWLNGKEYKCKVSNKALPAPIEKTISKAKGQPREPQVCTLPPSRDELTKNQVSLSCAVKGFYPSDIAVEWESNGQPENNYKTTPPVLDSDGSFFLVSKLTVDKSRWQQGNVFSCSVMHEALHNHYTQKSLSLSPGGPPSGSSPRAAAVKSPSGGGAVNGTSQFTCFYNSRANISCVWSQDGALQDTSCQVHAWPDRRRWNQTCELLPVSQASWACNLILGAPDSQKLTTVDIVTLRVLCREGVRWRVMAIQDFKPFENLRLMAPISLQVVHVETHRCNISWEISQASHYFERHLEFEARTLSPGHTWEEAPLLTLKQKQEWICLETLTPDTQYEFQVRVKPLQGEFTTWSPWSQPLAFRTKPAALGKD

SEQ ID NO: 276 - protein, 459 aa, Artificial Sequence
  Polypeptide chain
DKTHTCPPCPAPELLGGPSVFLFPPKPKDTLMASRTPEVTCVVVDVSHEDPEVKFNWYVDGVEVHNAKTKPREEQYASTYRVVSVLTVLHQDWLNGKEYKCKVSNKALPAPIEKTISKAKGQPREPQVCTLPPSRDELTKNQVSLSCAVKGFYPSDIAVEWESNGQPENNYKTTPPVLDSDGSFFLVSKLTVDKSRWQQGNVFSCSVMHEALHNHYTQKSLSLSPGGPPSGSSPMPYDLYHPSGGGAVNGTSQFTCFYNSRANISCVWSQDGALQDTSCQVHAWPDRRRWNQTCELLPVSQASWACNLILGAPDSQKLTTVDIVTLRVLCREGVRWRVMAIQDFKPFENLRLMAPISLQVVHVETHRCNISWEISQASHYFERHLEFEARTLSPGHTWEEAPLLTLKQKQEWICLETLTPDTQYEFQVRVKPLQGEFTTWSPWSQPLAFRTKPAALGKD

SEQ ID NO: 277 - protein, 459 aa, Artificial Sequence
  Polypeptide chain
DKTHTCPPCPAPELLGGPSVFLFPPKPKDTLMASRTPEVTCVVVDVSHEDPEVKFNWYVDGVEVHNAKTKPREEQYASTYRVVSVLTVLHQDWLNGKEYKCKVSNKALPAPIEKTISKAKGQPREPQVCTLPPSRDELTKNQVSLSCAVKGFYPSDIAVEWESNGQPENNYKTTPPVLDSDGSFFLVSKLTVDKSRWQQGNVFSCSVMHEALHNHYTQKSLSLSPGGPPSGSSPGVPLSLYGSGGGAVNGTSQFTCFYNSRANISCVWSQDGALQDTSCQVHAWPDRRRWNQTCELLPVSQASWACNLILGAPDSQKLTTVDIVTLRVLCREGVRWRVMAIQDFKPFENLRLMAPISLQVVHVETHRCNISWEISQASHYFERHLEFEARTLSPGHTWEEAPLLTLKQKQEWICLETLTPDTQYEFQVRVKPLQGEFTTWSPWSQPLAFRTKPAALGKD

SEQ ID NO: 278 - protein, 459 aa, Artificial Sequence; identical to SEQ ID NO: 40
  Polypeptide chain

SEQ ID NO: 279 - protein, 460 aa, Artificial Sequence
  Polypeptide chain
DKTHTCPPCPAPELLGGPSVFLFPPKPKDTLMISRTPEVTCVVVDVSHEDPEVKFNWYVDGVEVHNAKTKPREEQYASTYRVVSVLTVLHQDWLNGKEYKCKVSNKALPAPIEKTISKAKGQPREPQVCTLPPSRDELTKNQVSLSCAVKGFYPSDIAVEWESNGQPENNYKTTPPVLDSDGSFFLVSKLTVDKSRWQQGNVFSCSVMHEALHNHYTQKSLSLSPGGPPSGSSPGDSGGFMLTSGGGAVNGTSQFTCFYNSRANISCVWSQDGALQDTSCQVHAWPDRRRWNQTCELLPVSQASWACNLILGAPDSQKLTTVDIVTLRVLCREGVRWRVMAIQDFKPFENLRLMAPISLQVVHVETHRSNISWEISQASHYFERHLEFEARTLSPGHTWEEAPLLTLKQKQEWISLETLTPDTQYEFQVRVKPLQGEFTTWSPWSQPLAFRTKPAALGKD

SEQ ID NO: 280 - protein, 461 aa, Artificial Sequence
  Polypeptide chain
ESKYGPPCPPCPAPEFLGGPSVFLFPPKPKDTLMISRTPEVTCVVVDVSQEDPEVQFNWYVDGVEVHNAKTKPREEQFNSTYRVVSVLTVLHQDWLNGKEYKCKVSNKGLPSSIEKTISKAKGQPREPQVCTLPPSQEEMTKNQVSLSCAVKGFYPSDIAVEWESNGQPENNYKTTPPVLDSDGSFFLYSRLTVDKSRWQEGNVFSCSVMHEALHNHYTQKSLSLSLGGPPSGSSPGVPLSLYGSGGGAVNGTSQFTCFYNSRANISCVWSQDGALQDTSCQVHAWPDRRRWNQTCELLPVSQASWACNLILGAPDSQKLTTVDIVTLRVLCREGVRWRVMAIQDFKPFENLRLMAPISLQVVHVETHRCNISWEISQASHYFERHLEFEARTLSPGHTWEEAPLLTLKQKQEWICLETLTPDTQYEFQVRVKPLQGEFTTWSPWSQPLAFRTKPAALGKD

SEQ ID NO: 281 - protein, 376 aa, Artificial Sequence
  Polypeptide chain
DKTHTCPPCPAPELLGGPSVFLFPPKPKDTLMASRTPEVTCVVVDVSHEDPEVKFNWYVDGVEVHNAKTKPREEQYASTYRVVSVLTVLHQDWLNGKEYKCKVSNKALPAPIEKTISKAKGQPREPQVYTLPPCRDELTKNQVSLWCLVKGFYPSDIAVEWESNGQPENNYKTTPPVLDSDGSFFLYSKLTVDKSRWQQGNVFSCSVMHEALHNHYTQKSLSLSPGGGSSPPMPYDLYHPSGPAPTSSSTKKTQLQLEHLLLDLQMILNGINNYKNPKLTAMLTAKFAMPKKATELKHLQCLEEALKPLEEVLNLAQSKNFHLRPRDLISNINVIVLELKGSETTFMCEYADETATIVEFLNRWITFAQSIISTLT

SEQ ID NO: 282 - protein, 375 aa, Artificial Sequence
  Polypeptide chain
DKTHTCPPCPAPELLGGPSVFLFPPKPKDTLMASRTPEVTCVVVDVSHEDPEVKFNWYVDGVEVHNAKTKPREEQYASTYRVVSVLTVLHQDWLNGKEYKCKVSNKALPAPIEKTISKAKGQPREPQVYTLPPCRDELTKNQVSLWCLVKGFYPSDIAVEWESNGQPENNYKTTPPVLDSDGSFFLYSKLTVDKSRWQQGNVFSCSVMHEALHNHYTQKSLSLSPGGGPSDLLAVVAASSGPAPTSSSTKKTQLQLEHLLLDLQMILNGINNYKNPKLTAMLTAKFAMPKKATELKHLQCLEEALKPLEEVLNLAQSKNFHLRPRDLISNINVIVLELKGSETTFMCEYADETATIVEFLNRWITFAQSIISTLT

SEQ ID NO: 283 - protein, 376 aa, Artificial Sequence
  Polypeptide chain
DKTHTCPPCPAPELLGGPSVFLFPPKPKDTLMASRTPEVTCVVVDVSHEDPEVKFNWYVDGVEVHNAKTKPREEQYASTYRVVSVLTVLHQDWLNGKEYKCKVSNKALPAPIEKTISKAKGQPREPQVYTLPPCRDELTKNQVSLWCLVKGFYPSDIAVEWESNGQPENNYKTTPPVLDSDGSFFLYSKLTVDKSRWQQGNVFSCSVMHEALHNHYTQKSLSLSPGGSGPSDLLAVVAASSGPAPTSSSTKKTQLQLEHLLLDLQMILNGINNYKNPKLTAMLTAKFAMPKKATELKHLQCLEEALKPLEEVLNLAQSKNFHLRPRDLISNINVIVLELKGSETTFMCEYADETATIVEFLNRWITFAQSIISTLT

SEQ ID NO: 284 - protein, 377 aa, Artificial Sequence
  Polypeptide chain
DKTHTCPPCPAPELLGGPSVFLFPPKPKDTLMASRTPEVTCVVVDVSHEDPEVKFNWYVDGVEVHNAKTKPREEQYASTYRVVSVLTVLHQDWLNGKEYKCKVSNKALPAPIEKTISKAKGQPREPQVYTLPPCRDELTKNQVSLWCLVKGFYPSDIAVEWESNGQPENNYKTTPPVLDSDGSFFLYSKLTVDKSRWQQGNVFSCSVMHEALHNHYTQKSLSLSPGGSSGGPDLLAVVAASSGPAPTSSSTKKTQLQLEHLLLDLQMILNGINNYKNPKLTAMLTAKFAMPKKATELKHLQCLEEALKPLEEVLNLAQSKNFHLRPRDLISNINVIVLELKGSETTFMCEYADETATIVEFLNRWITFAQSIISTLT

SEQ ID NO: 285 - protein, 454 aa, Artificial Sequence; identical to SEQ ID NO: 125
  Polypeptide chain

SEQ ID NO: 286 - protein, 455 aa, Artificial Sequence; identical to SEQ ID NO: 126
  Polypeptide chain

SEQ ID NO: 287 - protein, 456 aa, Artificial Sequence; identical to SEQ ID NO: 127
  Polypeptide chain

SEQ ID NO: 288 - protein, 444 aa, Artificial Sequence
  Polypeptide chain
DKTHTCPPCPAPELLGGPSVFLFPPKPKDTLMISRTPEVTCVVVDVSHEDPEVKFNWYVDGVEVHNAKTKPREEQYNSTYRVVSVLTVLHQDWLNGKEYKCKVSNKALPAPIEKTISKAKGQPREPQVCTLPPSRDELTKNQVSLSCAVKGFYPSDIAVEWESNGQPENNYKTTPPVLDSDGSFFLVSKLTVDKSRWQQGNVFSCSVMHEALHNHYTQKSLSLSPGPGSGSAVNGTSQFTCFYNSRANISCVWSQDGALQDTSCQVHAWPDRRRWNQTCELLPVSQASWACNLILGAPDSQKLTTVDIVTLRVLCREGVRWRVMAIQDFKPFENLRLMAPISLQVVHVETHRCNISWEISQASHYFERHLEFEARTLSPGHTWEEAPLLTLKQKQEWICLETLTPDTQYEFQVRVKPLQGEFTTWSPWSQPLAFRTKPAALGKD

SEQ ID NO: 289 - protein, 376 aa, Artificial Sequence
  Polypeptide chain
DKTHTCPPCPAPELLGGPSVFLFPPKPKDTLMISRTPEVTCVVVDVSHEDPEVKFNWYVDGVEVHNAKTKPREEQYNSTYRVVSVLTVLHQDWLNGKEYKCKVSNKALPAPIEKTISKAKGQPREPQVYTLPPCRDELTKNQVSLWCLVKGFYPSDIAVEWESNGQPENNYKTTPPVLDSDGSFFLYSKLTVDKSRWQQGNVFSCSVMHEALHNHYTQKSLSLSPGGGSSPPGGGSSGGGSGPAPTSSSTKKTQLQLEHLLLDLQMILNGINNYKNPKLTAMLTAKFAMPKKATELKHLQCLEEALKPLEEVLNLAQSKNFHLRPRDLISNINVIVLELKGSETTFMCEYADETATIVEFLNRWITFAQSIISTLT

SEQ ID NO: 290 - protein, 372 aa, Artificial Sequence
  Polypeptide chain
DKTHTCPPCPAPELLGGPSVFLFPPKPKDTLMISRTPEVTCVVVDVSHEDPEVKFNWYVDGVEVHNAKTKPREEQYNSTYRVVSVLTVLHQDWLNGKEYKCKVSNKALPAPIEKTISKAKGQPREPQVYTLPPCRDELTKNQVSLWCLVKGFYPSDIAVEWESNGQPENNYKTTPPVLDSDGSFFLYSKLTVDKSRWQQGNVFSCSVMHEALHNHYTQKSLSLSPGGSPGVPLSLYSGPAPTSSSTKKTQLQLEHLLLDLQMILNGINNYKNPKLTAMLTAKFAMPKKATELKHLQCLEEALKPLEEVLNLAQSKNFHLRPRDLISNINVIVLELKGSETTFMCEYADETATIVEFLNRWITFAQSIISTLT

SEQ ID NO: 291 - protein, 459 aa, Artificial Sequence
  Polypeptide chain
DKTHTCPPCPAPELLGGPSVFLFPPKPKDTLMISRTPEVTCVVVDVSHEDPEVKFNWYVDGVEVHNAKTKPREEQYNSTYRVVSVLTVLHQDWLNGKEYKCKVSNKALPAPIEKTISKAKGQPREPQVCTLPPSRDELTKNQVSLSCAVKGFYPSDIAVEWESNGQPENNYKTTPPVLDSDGSFFLVSKLTVDKSRWQQGNVFSCSVMHEALHNHYTQKSLSLSPGGPPSGSSPGVPLSLYGSGGGAVNGTSQFTCFYNSRANISCVWSQDGALQDTSCQVHAWPDRRRWNQTCELLPVSQASWACNLILGAPDSQKLTTVDIVTLRVLCREGVRWRVMAIQDFKPFENLRLMAPISLQVVHVETHRCNISWEISQASHYFERHLEFEARTLSPGHTWEEAPLLTLKQKQEWICLETLTPDTQYEFQVRVKPLQGEFTTWSPWSQPLAFRTKPAALGKD

SEQ ID NO: 292 - protein, 376 aa, Artificial Sequence
  Polypeptide chain
DKTHTCPPCPAPELLGGPSVFLFPPKPKDTLMIARTPEVTCVVVDVSHEDPEVKFNWYVDGVEVHNAKTKPREEQYASTYRVVSVLTVLHQDWLNGKEYKCKVSNKALPAPIEKTISKAKGQPREPQVYTLPPCRDELTKNQVSLWCLVKGFYPSDIAVEWESNGQPENNYKTTPPVLDSDGSFFLYSKLTVDKSRWQQGNVFSCSVMHEALHNHYTQKSLSLSPGGGSSPPGGGSSGGGSGPAPTSSSTKKTQLQLEHLLLDLQMILNGINNYKNPKLTAMLTAKFAMPKKATELKHLQCLEEALKPLEEVLNLAQSKNFHLRPRDLISNINVIVLELKGSETTFMCEYADETATIVEFLNRWITFAQSIISTLT

SEQ ID NO: 293 - protein, 372 aa, Artificial Sequence
  Polypeptide chain
DKTHTCPPCPAPELLGGPSVFLFPPKPKDTLMIARTPEVTCVVVDVSHEDPEVKFNWYVDGVEVHNAKTKPREEQYASTYRVVSVLTVLHQDWLNGKEYKCKVSNKALPAPIEKTISKAKGQPREPQVYTLPPCRDELTKNQVSLWCLVKGFYPSDIAVEWESNGQPENNYKTTPPVLDSDGSFFLYSKLTVDKSRWQQGNVFSCSVMHEALHNHYTQKSLSLSPGGSPGVPLSLYSGPAPTSSSTKKTQLQLEHLLLDLQMILNGINNYKNPKLTAMLTAKFAMPKKATELKHLQCLEEALKPLEEVLNLAQSKNFHLRPRDLISNINVIVLELKGSETTFMCEYADETATIVEFLNRWITFAQSIISTLT

SEQ ID NO: 294 - protein, 375 aa, Artificial Sequence; identical to SEQ ID NO: 128
  Polypeptide chain

SEQ ID NO: 295 - protein, 376 aa, Artificial Sequence; identical to SEQ ID NO: 129
  Polypeptide chain

SEQ ID NO: 296 - protein, 377 aa, Artificial Sequence; identical to SEQ ID NO: 130
  Polypeptide chain

SEQ ID NO: 297 - protein, 18 aa, Artificial Sequence
  Linker
GGSGISSGLLSGRSSSGP

SEQ ID NO: 298 - protein, 15 aa, Artificial Sequence
  Linker
GISSGLLSGRSSSGP

SEQ ID NO: 299 - protein, 16 aa, Artificial Sequence
  Linker
RSGVPLSLYSGSGGGK

SEQ ID NO: 300 - protein, 14 aa, Artificial Sequence
  Linker
RSGMPYDLYHPSGK

SEQ ID NO: 301 - protein, 14 aa, Artificial Sequence
  Linker
RGPDSGGFMLTSGK

SEQ ID NO: 302 - protein, 15 aa, Artificial Sequence
  Linker
RGSGHEQLTVSGGSK

SEQ ID NO: 303 - protein, 14 aa, Artificial Sequence
  Linker
RSGRAAAVKSPSGK

SEQ ID NO: 304 - protein, 20 aa, Artificial Sequence
  Linker
RGSGISSGLLSGRSDNHSGK

SEQ ID NO: 305 - protein, 14 aa, Artificial Sequence
  Linker
RGDLLAVVAASGGK

SEQ ID NO: 306 - protein, 15 aa, Artificial Sequence
  Linker
RGGISSGLLSGRSGK

SEQ ID NO: 307 - protein, 227 aa, Artificial Sequence; identical to SEQ ID NO: 79
  Polypeptide chain

SEQ ID NO: 308 - protein, 362 aa, Artificial Sequence
  Polypeptide chain
DKTHTCPPCPAPELLGGPSVFLFPPKPKDTLMISRTPEVTCVVVDVSHEDPEVKFNWYVDGVEVHNAKTKPREEQYASTYRVVSVLTVLHQDWLNGKEYKCKVSNKALPAPIEKTISKAKGQPREPQVYTLPPCRDELTKNQVSLWCLVKGFYPSDIAVEWESNGQPENNYKTTPPVLDSDGSFFLYSKLTVDKSRWQQGNVFSCSVMHEALHNHYTQKSLSLSPGGGSSPPGGGSSGGGSGPSGSPGNWVNVISDLKKIEDLIQSMHIDATLYTESDVHPSCKVTAMKCFLLELQVISLESGDASIHDTVENLIILAQNSLSSNGQVTESGCKECEELEEKNIKEFLQSFVHIVQMFINTS

SEQ ID NO: 309 - protein, 444 aa, Artificial Sequence; identical to SEQ ID NO: 39
  Polypeptide chain

SEQ ID NO: 310 - protein, 362 aa, Artificial Sequence; identical to SEQ ID NO: 308
  Polypeptide chain

SEQ ID NO: 311 - protein, 444 aa, Artificial Sequence; identical to SEQ ID NO: 39
  Polypeptide chain

SEQ ID NO: 312 - protein, 358 aa, Artificial Sequence
  Polypeptide chain
DKTHTCPPCPAPELLGGPSVFLFPPKPKDTLMISRTPEVTCVVVDVSHEDPEVKFNWYVDGVEVHNAKTKPREEQYASTYRVVSVLTVLHQDWLNGKEYKCKVSNKALPAPIEKTISKAKGQPREPQVYTLPPCRDELTKNQVSLWCLVKGFYPSDIAVEWESNGQPENNYKTTPPVLDSDGSFFLYSKLTVDKSRWQQGNVFSCSVMHEALHNHYTQKSLSLSPGSGSDLLAVVAASSGPGSGNWVNVISDLKKIEDLIQSMHIDATLYTESDVHPSCKVTAMKCFLLELQVISLESGDASIHDTVENLIILAQNSLSSNGQVTESGCKECEELEEKNIKEFLQSFVHIVQMFINTS

SEQ ID NO: 313 - protein, 462 aa, Artificial Sequence
  Polypeptide chain
DKTHTCPPCPAPELLGGPSVFLFPPKPKDTLMISRTPEVTCVVVDVSHEDPEVKFNWYVDGVEVHNAKTKPREEQYASTYRVVSVLTVLHQDWLNGKEYKCKVSNKALPAPIEKTISKAKGQPREPQVCTLPPSRDELTKNQVSLSCAVKGFYPSDIAVEWESNGQPENNYKTTPPVLDSDGSFFLVSKLTVDKSRWQQGNVFSCSVMHEALHNHYTQKSLSLSPGSGSPSGDLLAVVAASSGPGSGSPAVNGTSQFTCFYNSRANISCVWSQDGALQDTSCQVHAWPDRRRWNQTCELLPVSQASWACNLILGAPDSQKLTTVDIVTLRVLCREGVRWRVMAIQDFKPFENLRLMAPISLQVVHVETHRSNISWEISQASHYFERHLEFEARTLSPGHTWEEAPLLTLKQKQEWISLETLTPDTQYEFQVRVKPLQGEFTTWSPWSQPLAFRTKPAALGKD

SEQ ID NO: 314 - protein, 362 aa, Artificial Sequence; identical to SEQ ID NO: 308
  Polypeptide chain

SEQ ID NO: 315 - protein, 444 aa, Artificial Sequence; identical to SEQ ID NO: 39
  Polypeptide chain

SEQ ID NO: 316 - protein, 365 aa, Artificial Sequence
  Polypeptide chain
DKTHTCPPCPAPELLGGPSVFLFPPKPKDTLMISRTPEVTCVVVDVSHEDPEVKFNWYVDGVEVHNAKTKPREEQYASTYRVVSVLTVLHQDWLNGKEYKCKVSNKALPAPIEKTISKAKGQPREPQVYTLPPCRDELTKNQVSLWCLVKGFYPSDIAVEWESNGQPENNYKTTPPVLDSDGSFFLYSKLTVDKSRWQQGNVFSCSVMHEALHNHYTQKSLSLSPGGGSSGGSPISSGLLSGRSSGPGSGSNWVNVISDLKKIEDLIQSMHIDATLYTESDVHPSCKVTAMKCFLLELQVISLESGDASIHDTVENLIILAQNSLSSNGQVTESGCKECEELEEKNIKEFLQSFVHIVQMFINTS

SEQ ID NO: 317 - protein, 461 aa, Artificial Sequence
  Polypeptide chain
DKTHTCPPCPAPELLGGPSVFLFPPKPKDTLMISRTPEVTCVVVDVSHEDPEVKFNWYVDGVEVHNAKTKPREEQYASTYRVVSVLTVLHQDWLNGKEYKCKVSNKALPAPIEKTISKAKGQPREPQVCTLPPSRDELTKNQVSLSCAVKGFYPSDIAVEWESNGQPENNYKTTPPVLDSDGSFFLVSKLTVDKSRWQQGNVFSCSVMHEALHNHYTQKSLSLSPGGPPSGSSPISSGLLSGRSSGGGAVNGTSQFTCFYNSRANISCVWSQDGALQDTSCQVHAWPDRRRWNQTCELLPVSQASWACNLILGAPDSQKLTTVDIVTLRVLCREGVRWRVMAIQDFKPFENLRLMAPISLQVVHVETHRSNISWEISQASHYFERHLEFEARTLSPGHTWEEAPLLTLKQKQEWISLETLTPDTQYEFQVRVKPLQGEFTTWSPWSQPLAFRTKPAALGKD

SEQ ID NO: 318 - protein, 362 aa, Artificial Sequence; identical to SEQ ID NO: 308
  Polypeptide chain

SEQ ID NO: 319 - protein, 6 aa, Artificial Sequence
  Fc domain
LALAPG

SEQ ID NO: 320 - protein, 8 aa, Artificial Sequence
  Fc domain
AKTEPKSS

SEQ ID NO: 321 - protein, 4 aa, Artificial Sequence
  Fc domain
DAPG

SEQ ID NO: 322 - protein, 5 aa, Artificial Sequence
  Fc domain
EPKSS

SEQ ID NO: 323 - protein, 13 aa, Artificial Sequence
  Cleavable peptide
ISSGLLSGRSDQP

SEQ ID NO: 324 - protein, 8 aa, Artificial Sequence
  Cleavable peptide
VPLSLYSG

What is claimed is:

1. A masked IL-2 cytokine comprising a protein heterodimer comprising:
a) a first polypeptide chain comprising a masking moiety linked to a first half-life extension domain via a first linker; and
b) a second polypeptide chain comprising an IL-2 cytokine or functional fragment thereof linked to a second half-life extension domain via a second linker,
wherein the first half-life extension domain is associated with the second half-life extension domain, and
wherein one of the first linker or the second linker is a proteolytically cleavable linker comprising a proteolytically cleavable peptide.

2. The masked IL-2 cytokine of claim 1, wherein the first polypeptide chain comprises formula 6:
N′HL1-L1-MM C′ (6)
and the second polypeptide chain comprises formula 5:
N′HL2-L2-C C′ (5)
where HL1 is the first half life extension domain, L1 is the first linker, MM is the masking moiety, HL2 is the second half life extension domain, L2 is the second linker, and C is the IL-2 cytokine or functional fragment thereof.

3. The masked IL-2 cytokine of claim 1 or claim 2, wherein the first half-life extension domain comprises a first Fc domain or a fragment thereof and the second half-life extension domain comprises an Fc domain or a fragment thereof.

4. The masked IL-2 cytokine of claim 3, wherein the first and/or second Fc domains each contain one or more modifications that promote the non-covalent association of the first and the second half-life extension domains.

5. The masked IL-2 cytokine of claim 3 or claim 4, wherein the first and second half-life extension domains are each an IgG1 Fc domain or fragment thereof.

6. The masked IL-2 cytokine of claim 5, wherein the first half-life extension domain comprises an IgG1 Fc domain or fragment thereof including the mutations Y349C; T366S; L38A; and Y407V to form a ‘hole’ in the first half-life extension domain and the second half-life extension domain comprises an IgG1 Fc domain or fragment thereof including the mutations S354C and T366W to form the ‘knob’ in the second half-life extension domain, numbered according to the Kabat EU numbering system.

7. The masked IL-2 cytokine of claim 5 or 6, wherein the first and second half-life extension domains are each an IgG1 Fc domain or fragment thereof and each comprise the amino substitution N297A, numbered according to the Kabat EU numbering system.

8. The masked IL-2 cytokine of any one of claims 5-7, wherein the first and second half-life extension domains are each an IgG1 Fc domain or fragment thereof and each comprise the amino substitution I253A, numbered according to the Kabat EU numbering system.

9. The masked IL-2 cytokine of claim 1 or claim 2, wherein the first half-life extension domain comprises the amino acid sequence of SEQ ID NO: 9, and the second half-life extension domain thereof comprises the amino acid sequence of SEQ ID NO: 12.

10. The masked IL-2 cytokine of claim 1 or claim 2, wherein the first half-life extension domain comprises the amino acid sequence of SEQ ID NO: 10 and the second half-life extension domain thereof comprises the amino acid sequence of SEQ ID NO: 13.

11. The masked IL-2 cytokine of any one of claims 1 to 10, wherein the IL-2 cytokine or functional fragment thereof is modified compared to the sequence of a mature IL-2 having SEQ ID NO: 2.

12. The masked IL-2 cytokine of claim 11, wherein the modified IL-2 cytokine or functional fragment thereof comprises modifications R38A, F42A, Y45A, and E62A relative to the sequence of a mature IL-2 having SEQ ID NO: 2.

13. The masked IL-2 cytokine of claim 11 or claim 12, wherein the modified IL-2 cytokine or functional fragment thereof comprises the modification C125A relative to the sequence of a mature IL-2 having SEQ ID NO: 2.

14. The masked IL-2 cytokine of any one of claims 11 to 13, wherein the modified IL-2 cytokine or functional fragment thereof comprises R38A, F42A, Y45A, E62A and C125A relative to the sequence of a mature IL-2 having SEQ ID NO: 2.

15. The masked IL-2 cytokine of any one of claims 1 to 14, wherein the IL-2 cytokine or functional fragment thereof comprises an amino acid sequence of SEQ ID NO: 3.

16. The masked IL-2 cytokine of any one of claims 1 to 15, wherein the masking moiety comprises IL-2Rβ or a fragment, portion or variant thereof.

17. The masked IL-2 cytokine of claim 16, wherein the IL-2Rβ or a fragment, portion or variant thereof comprises an amino acid sequence of SEQ ID NO: 4.

18. The masked IL-2 cytokine of claim 16, wherein the IL-2Rβ or a fragment, portion or variant thereof comprises an amino acid sequence of SEQ ID NO: 5.

19. The masked IL-2 cytokine of any one of claims 1 to 18, wherein the second linker comprises a proteolytically cleavable peptide such that the second linker is a proteolytically cleavable linker and the first linker does not comprise a proteolytically cleavable peptide such that the first linker is a non-proteolytically cleavable linker.

20. The masked IL-2 cytokine of any one of claims 1 to 18, wherein the first linker comprises a proteolytically cleavable peptide such that the first linker is a proteolytically cleavable linker and the second linker does not comprise a proteolytically cleavable peptide such that the second linker is a non-proteolytically cleavable linker.

21. The masked IL-2 cytokine of claim 19 or claim 20, wherein the non-proteolytically cleavable linker is between 3 and 18 amino acids in length.

22. The masked IL-2 cytokine of claim 21, wherein the non-proteolytically cleavable linker is between 3 and 8 amino acids in length.

23. The masked IL-2 cytokine of any one of claims 19 to 22, wherein the non-proteolytically cleavable linker is rich in amino acid residues G, S and P.

24. The masked IL-2 cytokine of any one of claims 19 to 23, wherein the non-proteolytically cleavable linker comprises an amino acid sequence of SEQ ID NO: 14.

25. The masked IL-2 cytokine of any one of claims 19 to 23, wherein the non-proteolytically cleavable linker comprises an amino acid sequence of SEQ ID NO: 23.

26. The masked IL-2 cytokine of any one of claims 1 to 25, wherein the proteolytically cleavable linker is from 10 to 25 amino acids in length.

27. The masked IL-2 cytokine of any one of claims 1 to 26, wherein the cleavable peptide within the proteolytically cleavable linker comprises an amino acid sequence selected from the group consisting of SEQ ID NOs: 24, 25, 26, 27 and 28.

28. The masked IL-2 cytokine of any one of claims 1 to 26, wherein the cleavable peptide within the proteolytically cleavable linker comprises SEQ ID NO: 118.

29. The masked IL-2 cytokine of any one of claims 1 to 26, wherein the cleavable peptide within the proteolytically cleavable linker comprises SEQ ID NO: 119.

30. The masked IL-2 cytokine of any one of claims 1 to 29, wherein the proteolytically cleavable linker comprises a proteolytically cleavable peptide flanked on both sides by a spacer domain.

31. The masked IL-2 cytokine of claim 30, wherein the spacer domains are rich in amino acid residues G, S and P.

32. The masked IL-2 cytokine of claim 30 or claim 31 wherein the spacer domains only include amino acid residue types selected from the group consisting of G, S and P.

33. The masked IL-2 cytokine of any one of claims 1 to 25, wherein the proteolytically cleavable linker comprises an amino acid sequence selected from the group consisting of SEQ ID NOs: 16, 17, 18, 19, 20, 21 and 22.

34. The masked IL-2 cytokine of claim 33, wherein the proteolytically cleavable linker comprises an amino acid sequence selected from the group consisting of SEQ ID NO: 19.

35. The masked IL-2 cytokine of claim 33, wherein the proteolytically cleavable linker comprises an amino acid sequence selected from the group consisting of SEQ ID NO: 17.

36. The masked IL-2 cytokine of claim 30, wherein the proteolytically cleavable linker comprises SD1-CP-SD2 where SD1 is a first spacer domain, CP is a cleavable peptide and SD2 is a second spacer domain, and wherein CP has an amino acid sequence as shown in SEQ ID NO: 118 and SD2 has an amino acid sequence as shown in SEQ ID NO: 29.

37. The masked IL-2 cytokine of claim 30, wherein the proteolytically cleavable linker comprises SD1-CP-SD2 where SD1 is a first spacer domain, CP is a cleavable peptide and SD2 is a second spacer domain, and wherein CP has an amino acid sequence as shown in SEQ ID NO: 119 and SD2 has an amino acid sequence as shown in SEQ ID NO: 29.

38. The masked IL-2 cytokine of claim 36 or claim 37, wherein SD2 is from 3 to 6 amino acids in length.

39. The masked IL-2 cytokine of claim 25, wherein the proteolytically cleavable linker comprises an amino acid sequence selected from the group consisting of SEQ ID NO: 115.

40. The masked IL-2 cytokine of claim 25, wherein the proteolytically cleavable linker comprises an amino acid sequence selected from the group consisting of SEQ ID NO: 116 and 117.

41. The masked IL-2 cytokine of claim 25, wherein the proteolytically cleavable linker comprises an amino acid sequence selected from the group consisting of SEQ ID NO: 112.

42. The masked IL-2 cytokine of claim 25, wherein the proteolytically cleavable linker comprises an amino acid sequence selected from the group consisting of SEQ ID NO: 113.

43. The masked IL-2 cytokine of claim 25, wherein the proteolytically cleavable linker comprises an amino acid sequence selected from the group consisting of SEQ ID NO: 114.

44. The masked IL-2 cytokine of claim 1 or claim 19, wherein the masked IL-2 cytokine comprises a first polypeptide chain of SEQ ID NO: 38.

45. The masked IL-2 cytokine of claim 1 or claim 19, wherein the masked IL-2 cytokine comprises a first polypeptide chain of SEQ ID NO: 39.

46. The masked IL-2 cytokine of claim 1 or claim 20, wherein the masked IL-2 cytokine comprises a first polypeptide chain of SEQ ID NO: 125.

47. The masked IL-2 cytokine of claim 1 or claim 20, wherein the masked IL-2 cytokine comprises a first polypeptide chain of SEQ ID NO: 126.

48. The masked IL-2 cytokine of claim 1 or claim 20, wherein the masked IL-2 cytokine comprises a first polypeptide chain of SEQ ID NO: 127.

49. The masked IL-2 cytokine of claim 1, wherein the masked IL-2 cytokine comprises a first polypeptide chain of SEQ ID NO: 39 and a second polypeptide chain of SEQ ID NO: 49.

50. The masked IL-2 cytokine of claim 1, wherein the masked IL-2 cytokine comprises a first polypeptide chain of SEQ ID NO: 40 and a second polypeptide chain of SEQ ID NO: 51.

51. The masked IL-2 cytokine of claim 1, wherein the masked IL-2 cytokine comprises a first polypeptide chain of SEQ ID NO: 38 and a second polypeptide chain of SEQ ID NO: 128.

52. The masked IL-2 cytokine of claim 1, wherein the masked IL-2 cytokine comprises a first polypeptide chain of SEQ ID NO: 38 and a second polypeptide chain of SEQ ID NO: 129.

53. The masked IL-2 cytokine of claim 1, wherein the masked IL-2 cytokine comprises a first polypeptide chain of SEQ ID NO: 38 and a second polypeptide chain of SEQ ID NO: 130.

54. The masked IL-2 cytokine of claim 1, wherein the masked IL-2 cytokine comprises a first polypeptide chain of SEQ ID NO: 125 and a second polypeptide chain of SEQ ID NO: 51.

55. The masked IL-2 cytokine of claim 1, wherein the masked IL-2 cytokine comprises a first polypeptide chain of SEQ ID NO: 126 and a second polypeptide chain of SEQ ID NO: 51.

56. The masked IL-2 cytokine of claim 1, wherein the masked IL-2 cytokine comprises a first polypeptide chain of SEQ ID NO: 127 and a second polypeptide chain of SEQ ID NO: 51.

57. A masked IL-2 cytokine comprising a masking moiety and an IL-2 cytokine or functional fragment thereof, wherein the masking moiety masks the IL-2 cytokine or functional fragment thereof thereby reducing or preventing binding of the IL-cytokine or functional fragment thereof to its cognate receptor, and wherein a proteolytically cleavable peptide is present between the IL-2 fragment or functional fragment thereof and masking moiety.

58. A masked IL-2 cytokine according to claim 57, wherein the masking moiety and IL-2 cytokine or functional fragment thereof are linked in a single polypeptide chain.

59. A masked IL-2 cytokine according to claim 57 or claim 58, wherein the masked IL-2 cytokine comprises a polypeptide chain comprising formula 1:
N′HL-L2-C-L1-MM C′ (1)
where HL is the half life extension domain, L1 is the first linker, MM is the masking moiety, L2 is the second linker, and C is the IL-2 cytokine or functional fragment thereof, wherein at least the first linker comprises a proteolytically cleavable peptide.

60. A masked IL-2 cytokine according to claim 57 or claim 58, wherein the masked IL-2 cytokine comprises a polypeptide chain comprising formula 2:
N′HL-L2-MM-L1-C C′ (2)
where HL is the half life extension domain, L1 is the first linker, MM is the masking moiety, L2 is the second linker, and C is the IL-2 cytokine or functional fragment thereof, wherein at least the first linker comprises a proteolytically cleavable peptide.

61. The masked IL-2 cytokine of any one of claims 57 to 60, wherein the masking moiety comprises IL-2Rβ or a fragment, portion or variant thereof.

62. The masked cytokine of claim 61, wherein the IL-2Rβ or a fragment, portion or variant thereof has mutations at amino acid positions C122 and C168 as compared to IL-2β of SEQ ID NO: 4.

63. The masked cytokine of claim 61 or claim 62, wherein the IL-2Rβ or a fragment, portion or variant thereof has mutations C122S and C168S as compared to IL-2β of SEQ ID NO: 4.

64. The masked IL-2 cytokine of any one of claims 57 to 63, wherein the half life extension domain (HL) comprises first and second half-life extension domains which are each an IgG1 Fc domain or fragment thereof.

65. The masked IL-2 cytokine of claim 64, wherein the first and/or second Fc domains each contain one or more modifications that promote the non-covalent association of the first and the second half-life extension domains.

66. The masked IL-2 cytokine of claim 64 or claim 65, wherein the first half-life extension domain comprises an IgG1 Fc domain or fragment thereof including the mutations Y349C; T366S; L38A; and Y407V to form a ‘hole’ in the first half-life extension domain and the second half-life extension domain comprises an IgG1 Fc domain or fragment thereof including the mutations S354C and T366W to form the ‘knob’ in the second half-life extension domain, numbered according to the Kabat EU numbering system.

67. The masked IL-2 cytokine of any one of claims 64 to 66, wherein the first and second half-life extension domains are each an IgG1 Fc domain or fragment thereof and each comprise the amino substitution N297A, numbered according to the Kabat EU numbering system.

68. The masked IL-2 cytokine of any one of claims 64 to 67, the first and second half-life extension domains are each an IgG1 Fc domain or fragment thereof and each comprise the amino substitution I253A, numbered according to the Kabat EU numbering system.

69. The masked IL-2 cytokine of any one of claims 64 to 67, wherein the first half-life extension domain comprises the amino acid sequence of SEQ ID NO: 9, and the second half-life extension domain thereof comprises the amino acid sequence of SEQ ID NO: 12.

70. The masked IL-2 cytokine of any one of claims 64 to 68, wherein the first half-life extension domain comprises the amino acid sequence of SEQ ID NO: 10 and the second half-life extension domain thereof comprises the amino acid sequence of SEQ ID NO: 13.

71. The masked IL-2 cytokine of any one of claims 57 to 70, wherein the cleavable peptide within the proteolytically cleavable linker comprises SEQ ID NO: 118.

72. The masked IL-2 cytokine of any one of claims 57 to 70, wherein the cleavable peptide within the proteolytically cleavable linker comprises SEQ ID NO: 119.

73. The masked IL-2 cytokine of claim 71, wherein the proteolytically cleavable linker comprises SD1-CP-SD2 where SD1 is a first spacer domain, CP is a cleavable peptide and SD2 is a second spacer domain, and wherein CP has an amino acid sequence as shown in SEQ ID NO: 118 and SD2 has an amino acid sequence as shown in SEQ ID NO: 29.

74. The masked IL-2 cytokine of claim 72, wherein the proteolytically cleavable linker comprises SD1-CP-SD2 where SD1 is a first spacer domain, CP is a cleavable peptide and SD2 is a second spacer domain, and wherein CP has an amino acid sequence as shown in SEQ ID NO: 118 and SD2 has an amino acid sequence as shown in SEQ ID NO: 29.

75. The masked IL-2 cytokine of claim 73 or claim 74, wherein SD2 is from 3 to 6 amino acids in length.

76. The masked IL-2 cytokine of any one of claims 57 to 70, wherein the proteolytically cleavable linker comprises an amino acid sequence selected from the group consisting of SEQ ID NO: 115.

77. The masked IL-2 cytokine of any one of claims 57 to 70, wherein the proteolytically cleavable linker comprises an amino acid sequence selected from the group consisting of SEQ ID NO: 116.

78. The masked IL-2 cytokine of any one of claims 57 to 70, wherein the proteolytically cleavable linker comprises an amino acid sequence selected from the group consisting of SEQ ID NO: 112.

79. The masked IL-2 cytokine of any one of claims 57 to 70, wherein the proteolytically cleavable linker comprises an amino acid sequence selected from the group consisting of SEQ ID NO: 113.

80. The masked IL-2 cytokine of any one of claims 57 to 70, wherein the proteolytically cleavable linker comprises an amino acid sequence selected from the group consisting of SEQ ID NO: 114.

81. A cleavage product capable of binding to its cognate receptor, the cleavage product comprising an IL-2 cytokine or functional fragment thereof, preparable by proteolytic cleavage of the cleavable peptide in the masked IL-2 cytokine as defined in of any one of claims 1 to 80.

82. A cleavage product of a masked IL-2 cytokine, where the cleavage product is capable of binding to its cognate receptor, the cleavage product comprising a polypeptide comprising formula 3:
PCP-SD-C (3)
wherein PCP is a portion of a proteolytically cleavable peptide; SD is a spacer domain; and C is an IL-2 cytokine or functional fragment thereof.

83. The cleavage product of claim 81 or claim 82, wherein the IL-2 cytokine or functional fragment thereof is modified compared to the sequence of a mature IL-2 polypeptide having SEQ ID NO: 2.

84. The cleavage product of claim 83, wherein the modified IL-2 cytokine or functional fragment thereof comprises modifications R38A, F42A, Y45A, and E62A relative to the sequence of a mature IL-2 having SEQ ID NO: 2.

85. The cleavage product of claim 83 or claim 84, wherein the modified IL-2 cytokine or functional fragment thereof comprises the modification C125A relative to the sequence of a mature IL-2 having SEQ ID NO: 2.

86. The cleavage product of any one of claims 83 to 85, wherein the modified IL-2 cytokine or functional fragment thereof comprises R38A, F42A, Y45A, E62A and C125A relative to the sequence of a mature IL-2 having SEQ ID NO: 2.

87. The cleavage product of any one of claims 83 to 86, wherein the IL-2 cytokine or functional fragment thereof comprises an amino acid sequence of SEQ ID NO: 3.

88. The cleavage product of any one of claims 82 to 87, wherein the spacer domain is rich in amino acid residues G, S and P.

89. The cleavage product of any one of claims 82 to 88, wherein the spacer domain only includes amino acid residue types selected from the group consisting of G, S and P.

90. The cleavage product of any one of claims 82 to 89, wherein the spacer domain comprises an amino acid sequence of any one of SEQ ID NO: 29, 30 and 31.

91. The cleavage product of any one of claims 82 to 90, wherein the portion of the proteolytically cleavable peptide is a portion of an amino acid sequence of any one of SEQ ID NOs: 24, 25, 26, 27 and 28.

92. The cleavage product of any one of claims 82 to 90, wherein the portion of the proteolytically cleavable peptide is a portion of an amino acid sequence of SEQ ID NO: 118.

93. The cleavage product of any one of claims 82 to 90, wherein the portion of the proteolytically cleavable peptide is a portion of an amino acid sequence of SEQ ID NO: 119.

94. The cleavage product of claim 82, comprising the amino acid sequence of SEQ ID NO: 56.

95. The cleavage product of claim 82, comprising the amino acid sequence of SEQ ID NO: 137.

96. A cleavage product of a masked IL-2 cytokine, where the cleavage product is capable of binding to its cognate receptor, the cleavage product comprising a protein heterodimer comprising:
a) a first polypeptide chain comprising a polypeptide comprising formula 4:
HL1-SD-PCP (4)
wherein HL1 is a first half-life extension domain; SD is a spacer domain; and PCP is a portion of a proteolytically cleavable peptide; and
b) a second polypeptide chain comprising a polypeptide comprising formula 5:
HL2-L2-C (5)
wherein HL2 is a second half-life extension domain; L2 is a linker; and C is an IL-2 cytokine or functional fragment thereof; and
wherein the first half-life extension domain is associated with the second half-life extension domain.

97. The cleavage product of claim 96, wherein the IL-2 cytokine or functional fragment thereof is modified compared to the sequence of a mature IL-2 having SEQ ID NO: 2.

98. The cleavage product of claim 97, wherein the modified IL-2 cytokine or functional fragment thereof comprises modifications R38A, F42A, Y45A, and E62A relative to the sequence of a mature IL-2 having SEQ ID NO: 2.

99. The cleavage product of claim 97 or claim 98, wherein the modified IL-2 cytokine or functional fragment thereof comprises the modification C125A relative to the sequence of a mature IL-2 having SEQ ID NO: 2.

100. The cleavage product of any one of claims 97 to 99, wherein the modified IL-2 cytokine or functional fragment thereof comprises R38A, F42A, Y45A, E62A and C125A.

101. The cleavage product of any one of claims 97 to 100, wherein the IL-2 cytokine or functional fragment thereof comprises an amino acid sequence of SEQ ID NO: 3.

102. The cleavage product of any one of claims 96 to 101, wherein the first half-life extension domain comprises a first Fc domain or a fragment thereof and the second Fc domain comprises an Fc domain or a fragment thereof.

103. The cleavage product of claim 102, wherein the first Fc domain comprises a CH3 domain or a fragment thereof and the second Fc domain comprises a CH3 domain or a fragment thereof.

104. The cleavage product of claim 102 or claim 103, wherein the first and/or second Fc domains each contain one or more modifications that promote the non-covalent association of the first and the second half-life extension domains.

105. The cleavage product of any one of claims 96 to 104, wherein the first and second half-life extension domains are each an IgG1 Fc domain or fragment thereof.

106. The cleavage product of claim 105, wherein the first and second half-life extension domains are each an IgG1 Fc domain or fragment thereof and each comprise the amino substitution N297A, numbered according to the Kabat EU numbering system.

107. The cleavage product of claim 105 or claim 106, the first and second half-life extension domains are each an IgG1 Fc domain or fragment thereof and each comprise the amino substitutions N297A and I253A, numbered according to the Kabat EU numbering system.

108. The cleavage product of claim 105, wherein the first half-life extension domain comprises the amino acid sequence of SEQ ID NO: 9, and the second half-life extension domain thereof comprises the amino acid sequence of SEQ ID NO: 12.

109. The cleavage product of claim 105, wherein the first half-life extension domain comprises the amino acid sequence of SEQ ID NO: 10 and the second half-life extension domain thereof comprises the amino acid sequence of SEQ ID NO: 13.

110. The cleavage product of any one of claims 96 to 109, wherein the second linker comprises an amino acid sequence of SEQ ID NO: 23.

111. The cleavage product of any one of claims 96 to 110, wherein the spacer domain is rich in amino acids residues G, S and P.

112. The cleavage product of any one of claims 96 to 111, wherein the spacer domain only includes amino acid residue types selected from the group consisting of G, S and P.

113. The cleavage product of any one of claims 96 to 112, wherein the spacer domain comprises an amino acid sequence of SEQ ID NOs: 32, 33, 34, 35, 36 and 37.

114. The cleavage product of any one of claims 96 to 113, wherein the portion of the proteolytically cleavable peptide is a portion of an amino acid sequence of any one of SEQ ID NOs: 24, 25, 26, 27 and 28.

115. The cleavage product of any one of claims 96 to 113, wherein the portion of the proteolytically cleavable peptide is a portion of an amino acid sequence of SEQ ID NO: 118.

116. The cleavage product of any one of claims 96 to 113, wherein the portion of the proteolytically cleavable peptide is a portion of an amino acid sequence of SEQ ID NO: 119.

117. The cleavage product of claim 96, comprising a first polypeptide chain having an amino acid sequence of SEQ ID NO: 59-B and a second polypeptide chain having an amino acid sequence of SEQ ID NO: 59-A.

118. The cleavage product of claim 96, comprising a first polypeptide chain having an amino acid sequence of SEQ ID NO: 139 and a second polypeptide chain having an amino acid sequence of SEQ ID NO: 138.

119. The cleavage product of claim 96, comprising a first polypeptide chain having an amino acid sequence of SEQ ID NO: 141 and a second polypeptide chain having an amino acid sequence of SEQ ID NO: 140.

120. The cleavage product of claim 96, comprising a first polypeptide chain having an amino acid sequence of SEQ ID NO: 143 and a second polypeptide chain having an amino acid sequence of SEQ ID NO: 142.

121. A nucleic acid encoding the masked IL-2 cytokine of any one of claims 1 to 80 or encoding one of the polypeptide chains of a masked IL-2 cytokine of any one of claims 1 to 80.

122. A vector comprising the nucleic acid of claim 121.

123. A host cell comprising nucleic acid encoding the masked IL-2 cytokine of any one of claims 1 to 80.

124. A composition comprising the masked IL-2 cytokine of any one of claims 1 to 80.

125. A pharmaceutical composition comprising the masked IL-2 cytokine of any one of claims 1 to 80, and a pharmaceutically acceptable carrier.

126. A kit comprising the masked IL-2 cytokine of any one of claims 1 to 80, or the composition of claim 124, or the pharmaceutical composition of claim 125.

127. A method of producing a masked IL-2 cytokine as defined in any one of claims 1 to 80 comprising culturing the host cell of claim 123 under a condition that produces the masked IL-2 cytokine.

128. A nucleic acid encoding the cleavage product of any one of claims 81 to 120.

129. A composition comprising the cleavage product of any one of claims 81 to 120.

130. A pharmaceutical composition comprising the cleavage product of any one of claims 81 to 120, and a pharmaceutically acceptable carrier.

131. The pharmaceutical composition of claim 130, wherein the pharmaceutical composition is in single unit dosage form.

132. The pharmaceutical composition of claim 130, wherein the pharmaceutical composition is formulated for intravenous administration and is in single unit dosage form.

133. The pharmaceutical composition of claim 130, wherein the pharmaceutical composition is formulated for injection and is in single unit dosage form.

134. The pharmaceutical composition of claim 130, wherein the pharmaceutical composition is a liquid and is in single unit dosage form.

135. A masked IL-2 cytokine as defined in any one of claims 1 to 80 for use in medicine.

136. A cleavage product as defined in any one of claims 81 to 120 for use in medicine.

137. A method of treating or preventing cancer in a subject, the method comprising administering to the subject an effective amount of a masked IL-2 cytokine according to any one of claims 1 to 80.

138. A method of treating or preventing cancer in a subject, the method comprising administering to the subject an effective amount of a composition according to claim 124 or claim 129.

139. A method of treating or preventing cancer in a subject, the method comprising administering to the subject an effective amount of a pharmaceutical composition according to any one of claims 125 and 130 to 134.

140. A method of treating or preventing cancer in a subject, the method comprising administering to the subject an effective amount of a masked IL-2 cytokine as defined in any one of claims 1 to 80, whereby the masked cytokine is proteolytically cleaved in vivo to produce a cleavage product as defined in one of claims 81 to 120.

141. A method of treating or preventing cancer in a subject, the method comprising a step of producing a cleavage product in vivo that is capable of binding to its cognate receptor, where the cleavage product is as defined in any one of claims 81 to 120.

142. A method according to any one of claims 137 to 141, wherein the cancer is a solid tumor.

143. A masked IL-2 cytokine as defined in any one of claims 1 to 80 for use in treating or preventing cancer.

144. A masked IL-2 cytokine as defined in any one of claims 1 to 80 for use in a method of treating or preventing cancer, the method comprising administering to the subject an effective amount of the masked IL-2 cytokine, whereby the masked cytokine is proteolytically cleaved in vivo to produce a cleavage product as defined in one of claims 81 to 120.

145. A masked IL-2 cytokine for use according to claim 143 or claim 144, wherein the cancer is a solid tumor.

146. A cleavage product as defined in any one of claims 81 to 120 for use in treating or preventing cancer.

147. A cleavage product as defined in any one of claims 81 to 120 for use in treating or preventing cancer, the method comprising a step of administering a masked cytokine as defined in any one of claims 1 to 80 to a patient, thereby producing the cleavage product by proteolytic cleavage of the masked cytokine in vivo.

148. A cleavage product as defined in any one of claims 81 to 120 for use in a method of treating or preventing cancer in a subject, the method comprising a step of producing the cleavage product by in vivo proteolytic cleavage from a masked cytokine as defined in any one of claims 1 to 80 that has been administered to the subject.

149. A cleavage product for use according to any one of claims 143 to 148, wherein the cancer is a solid tumor.
